(19) United States
(12) Patent Application Publication
(10) Pub. No.: US 2024/0287147 A1
(43) Pub. Date: Aug. 29, 2024

(54) PD-L1 BINDING PEPTIDES AND PEPTIDE COMPLEXES AND METHODS OF USE THEREOF

(71) Applicants: Fred Hutchinson Cancer Center, Seattle, WA (US); Blaze Bioscience, Inc., Seattle, WA (US)

(72) Inventors: Zachary CROOK, Seattle, WA (US); James OLSON, Seattle, WA (US); Natalie Winblade NAIRN, Seattle, WA (US); Colin CORRENTI, Seattle, WA (US)

(21) Appl. No.: 18/037,926

(22) PCT Filed: Nov. 29, 2021
(86) PCT No.: PCT/US2021/061039

§ 371 Date: May 19, 2023

Related U.S. Application Data
(60) Provisional application No. 63/119,195, filed on Nov. 30, 2020.
(60) Provisional application No. 63/273,103, filed on Oct. 28, 2021.

(51) Int. Cl. C07K 14/435

(52) U.S. Cl. CPC C07K 14/43522

(57) ABSTRACT

Described herein are cystine-dense peptides capable of binding to PD-L1. Such peptides may function as PD-L1 inhibitors by binding to the PD-1-binding interface of PD-L1 and inhibiting interactions between PD-L1 and PD-1. Methods of using PD-L1-binding peptides to treat cancers, autoimmune diseases, or other conditions are also described herein. Such methods include delivering active agents complexed with a PD-L1-binding peptide to a PD-L1 positive cell or using a bispecific immune cell engager to recruit immune cells to PD-L1 positive cells. Also described herein are chimeric antigen receptors comprising PD-L1-binding peptides.

### CROSS-REFERENCE

[0001] The present application claims the benefit of U.S. Provisional Application No. 63/119,195, entitled “COMPOSITIONS AND METHODS FOR SELECTIVE DEPLETION OF TARGET MOLECULES,” filed on Nov. 30, 2020; and U.S. Provisional Application No. 63/273,103, entitled “PD-L1 BINDING PEPTIDES AND PEPTIDE COMPLEXES AND METHODS OF USE THEREOF,” filed on Oct. 28, 2021, each of which applications are herein incorporated by reference in their entirety for all purposes.

### SEQUENCE LISTING

[0002] The instant application contains a Sequence Listing which has been submitted electronically in ASCII format and is hereby incorporated by reference in its entirety. Said ASCII copy, created on Nov. 23, 2021, is named 108406-709288_SL.txt and is 627,485 bytes in size.

### BACKGROUND

[0003] Programmed death-ligand 1 (PD-L1), a transmembrane protein that binds programmed cell death protein 1 (PD-1), is thought to play a role in immune suppression and inactivation of T cells. Cancer cells that express PD-L1 can evade the host immune response by binding to PD-1 receptors on host T cells and inactivate the T cells, preventing destruction of the cancer cell by the host immune system. Anti-PD-L1 antibodies may block binding of PD-L1 to PD-1. However, there is a need for additional PD-L1-binding agents that may be used to target PD-L1.

### SUMMARY

[0004] In various aspects, the present disclosure provides PD-L1-binding peptide comprising a first PD-L1-binding motif comprising a sequence of: (a) X¹X²X³X⁴X⁵X⁶CX⁷X⁸X⁹C (SEQ ID NO: 361), wherein X¹ is D, E, H, K, N, Q, S, T, L, V, F, Y, or P; X² is G, E, Q, or F; X³ is D or K; X⁴ is G, V, or P; X⁵ is G, H, R, V, F, W, or P; X⁶ is A, D, or K; X⁷ is E, H, Q, L, or F; X⁸ is D, E, R, S, T, M, L, or F; and X⁹ is G, A, D, E, H, K, R, M, L, or P; or (b) X¹FX²VFX²CLX³X³C (SEQ ID NO: 363), wherein X¹ is K or P; X² is independently D or K; and X³ is independently any non-cysteine amino acid.

[0005] In some aspects, the PD-L1-binding peptide comprises at least six cysteine residues. In some aspects, the at least six cysteine residues are located at amino acid positions n, n+4, n+14, n+28, n+38, and n+42, wherein n corresponds to a position of a first cysteine residue of the at least six cysteine residues. In some aspects, amino acid position n corresponds to amino acid position 4, such that the at least six cysteine amino acid residues are located at amino acid positions 4, 8, 18, 32, 42, and 46.

[0006] In some aspects, the PD-L1-binding peptide further comprises at least three disulfide bonds connecting the at least six cysteine residues. In some aspects, the at least three disulfide bonds connect: a first cysteine residue of the at least six cysteine residues to a sixth cysteine residue of the at least six cysteine residues, a second cysteine residue of the at least six cysteine residues to a fifth cysteine residue of the at least six cysteine residues, a third cysteine residue of the at least six cysteine residues to a forth cysteine residue of the at least six cysteine residues. In some aspects, the first cysteine residue is at amino acid position n, the second cysteine residue is at amino acid position n+4, the third cysteine residue is at amino acid position n+14, the fourth cysteine residue is at amino acid position n+28, the fifth cysteine residue is at amino acid position n+38, and the sixth cysteine residue is at amino acid position n+42. In some aspects, the first cysteine residue is at amino acid position 4, the second cysteine residue is at amino acid position 8, the third cysteine residue is at amino acid position 18, the fourth cysteine residue is at amino acid position 32, the fifth cysteine residue is at amino acid position 42, and the sixth cysteine residue is at amino acid position 46.

[0007] In some aspects, the PD-L1-binding peptide further comprises a first alpha helix comprising residues n to n+20, where n corresponds to an amino acid position of a first cysteine residue. In some aspects, the PD-L1-binding peptide further comprises a second alpha helix comprising residues n+34 to n+44, where n corresponds to an amino acid position of a first cysteine residue. In some aspects, the second alpha helix comprises residues n+29 to n+44.

[0008] In some aspects, the N-terminal amino acid residue of the first PD-L1-binding motif is located at amino acid residue position n+32, where n corresponds to an amino acid position of a first cysteine residue. In some aspects, the C-terminal amino acid residue of the first PD-L1-binding motif is located at amino acid position n+42, where n corresponds to an amino acid position of a first cysteine residue. In some aspects, the first PD-L1-binding motif comprises a sequence of KFDVFKCLDHC (SEQ ID NO: 365).

[0009] In some aspects, the PD-L1-binding peptide further comprises a second PD-L1-binding motif comprising a sequence of: (a) CX¹X²X³CX⁴X⁵X⁶X⁷X⁸X⁹X¹⁰X¹¹X¹²C (SEQ ID NO: 360), wherein X¹ is K, R, or V; X² is E, Q, S, M, L, or V; X³ is D, E, H, K, R, N, Q, S, or Y; X⁴ is D, M, or V; X⁵ is A, K, R, Q, S, or T; X⁶ is A, D, E, H, Q, S, T, M, I, L, V, or W; X⁷ is A, E, R, Q, S, T, W, or P; X⁸ is A, E, K, R, N, Q, T, M, I, L, V, or W; X⁹ is G, A, E, K, N, T, or Y; X¹⁰ is G, A, D, E, H, K, R, N, Q, S, T, M, I, L, V, W, Y, or P; X¹¹ is D, K, R, N, L, or V; and X¹² is G, A, D, T, L, W, or P; or (b) CKVX¹CVX¹X¹X¹X¹X²X³KX¹C (SEQ ID NO: 362), wherein X¹ is independently any non-cysteine amino acid; X² is M, I, L, or V; and X³ is Y, A, H, K, R, N, Q, S, or T. In some aspects, the N-terminal amino acid residue of the second PD-L1-binding motif is located at amino acid residue position n, where n corresponds to an amino acid position of a first cysteine residue. In some aspects, the C-terminal amino acid residue of the first PD-L1-binding motif is located at amino acid position n+14, where n corresponds to an amino acid position of a first cysteine residue. In some aspects, the second PD-L1-binding motif comprises a sequence of CKVHCVKEWMAGKAC (SEQ ID NO: 364).

[0010] In some aspects, the PD-L1-binding peptide comprises a sequence of SEQ ID NO: 358 or SEQ ID NO: 359. In some aspects, the PD-L1-binding peptide comprises a sequence having at least 80%, at least 85%, at least 90%, at least 95%, at least 97%, or 100% sequence identity to SEQ ID NO: 1. In some aspects, the PD-L1-binding peptide comprises a sequence having at least 80%, at least 85%, at least 90%, at least 95%, at least 97%, or 100% sequence identity to SEQ ID NO: 2. In some aspects, the PD-L1-binding peptide comprises a sequence having at least 80%, at least 85%, at least 90%, at least 95%, at least 97%, or 100% sequence identity to SEQ ID NO: 3. In some aspects, the PD-L1-binding peptide comprises a sequence having at least 80%, at least 85%, at least 90%, at least 95%, at least 97%, or 100% sequence identity to SEQ ID NO: 4.

[0011] In various aspects, the present disclosure provides a PD-L1-binding peptide comprising at least six cysteine residues are located at amino acid positions n, n+4, n+14, n+28, n+38, and n+42, wherein n corresponds to a position of a first cysteine residue of the at least six cysteine residues, and at least 80%, at least 85%, at least 90%, at least 95%, at least 97%, or 100% sequence identity to SEQ ID NO: 57 or SEQ ID NO: 59.

[0012] In various aspects, the present disclosure provides a PD-L1-binding peptide comprising at least eight cysteine residues are located at amino acid positions n, n+11, n+17, n+21, n+31, n+38, n+40, or n+44, wherein n corresponds to a position of a first cysteine residue of the at least six cysteine residues, and at least 80%, at least 85%, at least 90%, at least 95%, at least 97%, or 100% sequence identity to SEQ ID NO: 58.

[0013] In various aspects, the present disclosure provides a PD-L1-binding peptide comprising a sequence having at least 80%, at least 85%, at least 90%, at least 95%, at least 97%, or 100% sequence identity to any one of SEQ ID NO: 1-SEQ ID NO: 118, SEQ ID NO: 435, SEQ ID NO: 436, SEQ ID NO: 437, or SEQ ID NO: 554-SEQ ID NO: 567.

[0014] In some aspects, the PD-L1-binding peptide comprises a sequence of any one of SEQ ID NO: 1-SEQ ID NO: 118, SEQ ID NO: 435, SEQ ID NO: 436, SEQ ID NO: 437, or SEQ ID NO: 554-SEQ ID NO: 567.

[0015] In some aspects, the PD-L1-binding peptide is capable of binding to PD-L1 with an equilibrium dissociation constant (K_{D}) of not greater than 100 nM, not greater than 50 nM, not greater than 1 nM, not greater than 500 pM, not greater than 300 pM, not greater than 250 pM, or not greater than 200 pM. In some aspects, the PD-L1-binding peptide is capable of binding to PD-L1 with an equilibrium dissociation constant (K_{D}) of not greater than 1 nM. In some aspects, the PD-L1-binding peptide is capable of binding to a human PD-L1 and a cynomolgus PD-L1 with an equilibrium dissociation constant (K_{D}) that differs by no more than 1.5-fold, no more than 2-fold, no more than 5-fold, or no more than 10-fold.

[0016] In some aspects, the PD-L1-binding peptide comprises at least 43, at least 44, at least 45, at least 46, at least 47, at least 48, or at least 49 amino acid residues.

[0017] The PD-L1-binding peptide of any one of claims 1-29, wherein the PD-L1-binding peptide comprises from 43 to 51 amino acid residues. In some aspects, the PD-L1-binding peptide comprises not more than 50 amino acid residues. In some aspects, the PD-L1-binding peptide comprises from 43 to 49 amino acid residues.

[0018] In some aspects, the PD-L1-binding peptide further comprises a half-life modifying agent. In some aspects, the half-life modifying agent is selected from the group consisting of a polymer, a polyethylene glycol (PEG), a hydroxyethyl starch, polyvinyl alcohol, a water soluble polymer, a zwitterionic water soluble polymer, a water soluble poly(amino acid), a water soluble polymer of proline, alanine and serine, a water soluble polymer containing glycine, glutamic acid, and serine, an Fc region, a fatty acid, palmitic acid, albumin, and a molecule that binds to albumin. In some aspects, the half-life modifying agent is an albumin-binding peptide. In some aspects, the half-life modifying agent is an Fc domain. In some aspects, the half-life modifying agent is a polyethylene glycol. In some aspects, the half-life modifying agent is a fatty acid.

[0019] In various aspects, the present disclosure provides a peptide complex comprising a PD-L1-binding peptide complexed with an active agent, wherein the PD-L1-binding peptide comprises: at least six cysteine residues located at amino acid positions n, n+4, n+14, n+28, n+38, and n+42, where n corresponds to an amino acid position of a first cysteine residue of the at least six cysteine residues; at least three disulfide bonds connecting the first cysteine residue to a sixth cysteine residue of the at least six cysteine residues, a second cysteine residue of the at least six cysteine residues to a fifth cysteine residue of the at least six cysteine residues, a third cysteine residue of the at least six cysteine residues to a forth cysteine residue of the at least six cysteine residues.

[0020] In some aspects, amino acid position n corresponds to amino acid position 4, such that the at least six cysteine amino acid residues are located at amino acid positions 4, 8, 18, 32, 42, and 46. In some aspects, the PD-L1-binding peptide further comprises a first alpha helix comprising residues n to n+20, where n corresponds to an amino acid position of a first cysteine residue. In some aspects, the PD-L1-binding peptide further comprises a second alpha helix comprising residues n+34 to n+44, where n corresponds to an amino acid position of a first cysteine residue. In some aspects, the second alpha helix comprises residues n+29 to n+44.

[0021] In some aspects, the PD-L1-binding peptide comprises a first PD-L1-binding motif comprising a sequence of: (a) X¹X²X³X⁴X⁵X⁶CX⁷X⁸X⁹C (SEQ ID NO: 361), wherein X¹ is D, E, H, K, N, Q, S, T, L, V, F, Y, or P; X² is G, E, Q, or F; X³ is D or K; X⁴ is G, V, or P; X⁵ is G, H, R, V, F, W, or P; X⁶ is A, D, or K; X⁷ is E, H, Q, L, or F; X⁸ is D, E, R, S, T, M, L, or F; and X⁹ is G, A, D, E, H, K, R, M, L, or P; or (b) X¹FX²VFX²CLX³X³C (SEQ ID NO: 363), wherein X¹ is K or P; X² is independently D or K; and X³ is independently any non-cysteine amino acid. In some aspects, the N-terminal amino acid residue of the first PD-L1-binding motif is located at amino acid residue position n+32. In some aspects, the C-terminal amino acid residue of the first PD-L1-binding motif is located at amino acid position n+42. In some aspects, the first PD-L1-binding motif comprises a sequence of KFDVFKCLDHC (SEQ ID NO: 365).

[0022] In some aspects, the PD-L1-binding peptide further comprises a second PD-L1-binding motif comprising a sequence of: (a) CX¹X²X³CX⁴X⁵X⁶X⁷X⁸X⁹X¹⁰X¹¹X¹²C (SEQ ID NO: 360), wherein X¹ is K, R, or V; X² is E, Q, S, M, L, or V; X³ is D, E, H, K, R, N, Q, S, or Y; X⁴ is D, M, or V; X⁵ is A, K, R, Q, S, or T; X⁶ is A, D, E, H, Q, S, T, M, I, L, V, or W; X⁷ is A, E, R, Q, S, T, W, or P; X⁸ is A, E, K, R, N, Q, T, M, I, L, V, or W; X⁹ is G, A, E, K, N, T, or Y; X¹⁰ is G, A, D, E, H, K, R, N, Q, S, T, M, I, L, V, W, Y, or P; X¹¹ is D, K, R, N, L, or V; and X¹² is G, A, D, T, L, W, or P; or (b) CKVX¹CVX¹X¹X¹X¹X²X³KX¹C (SEQ ID NO: 362), wherein X¹ is independently any non-cysteine amino acid; X² is M, I, L, or V; and X³ is Y, A, H, K, R, N, Q, S, or T. In some aspects, the N-terminal amino acid residue of the second PD-L1-binding motif is located at amino acid residue position n. In some aspects, the C-terminal amino acid residue of the first PD-L1-binding motif is located at amino acid position n+14. In some aspects, the second PD-L1-binding motif comprises a sequence of CKVHCVKEWMAGKAC (SEQ ID NO: 364). In some aspects, amino acid position n corresponds to amino acid position 4 of the PD-L1-binding peptide, such that the at least six cysteine amino acid residues are located at amino acid positions 4, 8, 18, 32, 42, and 46 of the PD-L1-binding peptide.

[0023] In some aspects, the PD-L1-binding peptide is capable of binding to PD-L1 with an equilibrium dissociation constant (K_{D}) of not greater than 100 nM, not greater than 50 nM, not greater than 30 nM, not greater than 20 nM, not greater than 1 nM, not greater than 500 pM, not greater than 300 pM, not greater than 250 pM, or not greater than 200 pM. In some aspects, the PD-L1-binding peptide comprises at least 43, at least 44, at least 45, at least 46, at least 47, at least 48, or at least 49 amino acid residues. In some aspects, the PD-L1-binding peptide comprises from 43 to 51 amino acid residues. In some aspects, the PD-L1-binding peptide comprises from 43 to 49 amino acid residues.

[0024] In various aspects, the present disclosure provides a peptide complex comprising any PD-L1-binding peptide described herein complexed with an active agent.

[0025] In some aspects, the active agent comprises an immune cell targeting agent. In some aspects, the immune cell targeting agent is an immune cell targeting peptide. In some aspects, the immune cell targeting agent comprises a single chain variable fragment (scFv), a cysteine-dense peptide, an avimer, a kunitz domain, an affibody, an adnectin, a nanofittin, a fynomer, a 8-hairpin, a stapled peptide, a bicyclic peptide, an antibody, an antibody fragment, a protein, a peptide, a peptide fragment, a binding domain, a small molecule, or a nanobody capable of binding to an immune cell. In some aspects, the immune cell targeting agent is capable of binding a T cell, a B cell, a macrophage, a natural killer cell, a fibroblast, a regulatory T cell, a regulatory immune cell, a neural stem cell, or a mesenchymal stem cell. In some aspects, the immune cell targeting agent is capable of binding a T cell. In some aspects, the immune cell targeting agent is capable of binding a regulatory T cell. In some aspects, the immune cell targeting agent is capable of binding CD3, 4-1BB, CD28, CD137, CD89, CD16, CD25, CD13, CD29, CD44, CD71, CD73, CD90, CD105, CD166, CD27, GITR, TIGIT, LAG3, TCR, CD40L, OX40, PD-1, CTLA-4, or STRO-1. In some aspects, the immune cell targeting agent is capable of binding CD3. In some aspects, the immune cell targeting agent is capable of binding CD25. In some aspects, the immune cell targeting agent is capable of binding 4-1BB. In some aspects, the immune cell targeting agent is capable of binding CD28. In some aspects, the immune cell targeting agent comprises a sequence having at least 90% sequence identity to any one of SEQ ID NO: 122 or SEQ ID NO: 442-SEQ ID NO: 491.

[0026] In some aspects, the immune cell targeting agent is fused to a first heterodimerization domain and the PD-L1-binding peptide is fused to a second heterodimerization domain. In some aspects, the first heterodimerization domain complexes with the second heterodimerization domain to form a heterodimer. In some aspects, the first heterodimerization domain, the second dimerization domain, or both comprises a Fc domain. In some aspects, the first heterodimerization domain, the second dimerization domain, or both comprises a sequence of any one of SEQ ID NO: 124-SEQ ID NO: 153. In some aspects, the first heterodimerization domain comprises a sequence of any one of SEQ ID NO: 124, SEQ ID NO: 126, SEQ ID NO: 128, SEQ ID NO: 130, SEQ ID NO: 132, SEQ ID NO: 134, SEQ ID NO: 136, SEQ ID NO: 138, SEQ ID NO: 140, SEQ ID NO: 142, SEQ ID NO: 144, SEQ ID NO: 146, SEQ ID NO: 148, SEQ ID NO: 150, or SEQ ID NO: 152 and the second heterodimerization domain comprises a sequence of any one of SEQ ID NO: 125, SEQ ID NO: 127, SEQ ID NO: 129, SEQ ID NO: 131, SEQ ID NO: 133, SEQ ID NO: 135, SEQ ID NO: 137, SEQ ID NO: 139, SEQ ID NO: 141, SEQ ID NO: 143, SEQ ID NO: 145, SEQ ID NO: 147, SEQ ID NO: 149, SEQ ID NO: 151, or SEQ ID NO: 153. In some aspects, the first heterodimerization domain comprises Chain 1 of a heterodimerization pair provided in TABLE 3. In some aspects, the second heterodimerization domain comprises Chain 2 of a heterodimerization pair provided in TABLE 3. In some aspects, the second heterodimerization domain comprises a sequence of any one of SEQ ID NO: 124, SEQ ID NO: 126, SEQ ID NO: 128, SEQ ID NO: 130, SEQ ID NO: 132, SEQ ID NO: 134, SEQ ID NO: 136, SEQ ID NO: 138, SEQ ID NO: 140, SEQ ID NO: 142, SEQ ID NO: 144, SEQ ID NO: 146, SEQ ID NO: 148, SEQ ID NO: 150, or SEQ ID NO: 152 and the first heterodimerization domain comprises a sequence of any one of SEQ ID NO: 125, SEQ ID NO: 127, SEQ ID NO: 129, SEQ ID NO: 131, SEQ ID NO: 133, SEQ ID NO: 135, SEQ ID NO: 137, SEQ ID NO: 139, SEQ ID NO: 141, SEQ ID NO: 143, SEQ ID NO: 145, SEQ ID NO: 147, SEQ ID NO: 149, SEQ ID NO: 151, or SEQ ID NO: 153. In some aspects, the first heterodimerization domain comprises Chain 2 of a heterodimerization pair provided in TABLE 3. In some aspects, the second heterodimerization domain comprises Chain 1 of a heterodimerization pair provided in TABLE 3. In some aspects, the peptide complex comprises a sequence having at least 90% sequence identity to SEQ ID NO: 119 or SEQ ID NO: 120. In some aspects, the peptide complex comprises a sequence having at least 90% sequence identity to SEQ ID NO: 123.

[0027] In some aspects, the immune cell targeting agent and the PD-L1-binding peptide are fused to a homodimerization domain. In some aspects, the immune cell targeting agent and the PD-L1-binding peptide form a single polypeptide chain. In some aspects, the peptide complex comprises a sequence having at least 90% sequence identity to any one of SEQ ID NO: 121 or SEQ ID NO: 438-SEQ ID NO: 441.

[0028] In some aspects, the immune cell targeting agent is linked to the PD-L1-binding peptide via a linker. In some aspects, the linker comprises a peptide linker. In some aspects, linker comprises a small molecule linker. In some aspects, the linker comprises an Fc domain. In some aspects, the peptide complex further comprises an albumin-binding domain, a polyethylene glycol, or both.

[0029] In some aspects, the active agent comprises a transmembrane domain, an intracytoplasmic domain, or a combination thereof. In some aspects, the active agent comprises a chimeric antigen receptor. In some aspects, the peptide complex further comprises a T cell.

[0030] In some aspects, the active agent comprises a therapeutic agent, a detectable agent, or a combination thereof. In some aspects, the detectable agent comprises a fluorophore, a near-infrared dye, a contrast agent, a nanoparticle, a metal-containing nanoparticle, a metal chelate, an X-ray contrast agent, a PET agent, a radionuclide, or a radionuclide chelator. In some aspects, the therapeutic agent comprises an anti-cancer agent, a chemotherapeutic agent, a radiotherapy agent, an anti-inflammatory agent, a proinflammatory cytokine, an oligonucleotide, an immuno-oncology agent, or a combination thereof. In some aspects, the active agent comprises a radioisotope. In some aspects, the radioisotope comprises an alpha emitter, a beta emitter, a positron emitter, a gamma emitter, a metal, actinium, americium, bismuth, cadmium, cesium, cobalt, europium, gadolinium, iridium, lead, lutetium, manganese, palladium, polonium, radium, ruthenium, samarium, strontium, technetium, thallium, and yttrium. In some embodiments, the metal is actinium, bismuth, lead, radium, strontium, samarium, yttrium, actinium-225, lead-212, ¹¹C or ¹⁴C, ¹³N, ¹⁸F, ⁶⁷Ga, ⁶⁸Ga, ⁶⁴Cu, ⁶⁷Cu, ⁸⁹Zr, ¹⁷⁷Lu, indium-111, technetium-99m, yttrium-90, iodine-131, iodine-123, or astatine-211.

[0031] In some aspects, the oligonucleotide comprises a DNA, an RNA, an antisense oligonucleotide, an aptamer, an miRNA, an siRNA, an alternative splicing modulator, a mRNA-binding sequence, an miRNA-binding sequence, an siRNA-binding sequence, an RNaseH1-binding oligonucleotide, a RISC-binding oligonucleotide, a polyadenylation modulator, or a combination thereof. In some aspects, the oligonucleotide comprises a sequence of any one of SEQ ID NO: 366-SEQ ID NO: 396, SEQ ID NO: 492-SEQ ID NO: 545, or SEQ ID NO: 552. In some aspects, the oligonucleotide binds a target sequence comprising any one of SEQ ID NO: 397-SEQ ID NO: 430 or SEQ ID NO: 546-SEQ ID NO: 549. In some aspects, the peptide complex remains intact after incubation in human serum. In some aspects, at least 5%-10%, at least 10%-20%, at least 20%-30%, at least 30%-40%, at least 40%-50%, at least 50%-60%, at least 60%-70%, at least 70%-80%, at least 80%-90%, or at least 90%-100% remains intact after incubation in human serum. In some aspects, the PD-L1-binding peptide retains an equilibrium dissociation constant (K_{D}) for PD-L1 of no more than 10 nM, 5 nM, 1 nM, 800 pM, 600 pM, 500 pM, 400 pM, 300 pM, 250 pM, or 200 pM when complexed with the oligonucleotide. In some aspects, the PD-L1-binding peptide has a lower affinity for PD-L1 at pH 5.5, 6.0, or 6.5 than at pH 7.4.

[0032] In some aspects, the anti-inflammatory agent comprises an anti-inflammatory cytokine, a steroid, a glucocorticoid, a corticosteroid, a cytokine inhibitor, a RORgamma inhibitor, a JAK inhibitor, a tyroskine kinase inhibitor, or a nonsteroidal anti-inflammatory drug. In some aspects, the anti-cancer agent comprises an antineoplastic agent, a cytotoxic agent, a tyrosine kinase inhibitor, an mTOR inhibitor, a retinoid, a microtubule polymerization inhibitor, a pyrrolobenzodiazepine dimer, or an anti-cancer antibody. In some aspects, the proinflammatory cytokine comprises a TNFα, an IL-2, an IL-6, an IL-12, an IL-15, an IL-21, or an IFNγ. In some aspects, the therapeutic agent comprises an oncolytic viral vector.

[0033] In some aspects, the peptide complex further comprises a half-life modifying agent. In some aspects, the half-life modifying agent is selected from the group consisting of a polymer, a polyethylene glycol (PEG), a hydroxyethyl starch, polyvinyl alcohol, a water soluble polymer, a zwitterionic water soluble polymer, a water soluble poly(amino acid), a water soluble polymer of proline, alanine and serine, a water soluble polymer containing glycine, glutamic acid, and serine, an Fc region, a fatty acid, palmitic acid, and a molecule that binds to albumin. In some aspects, the molecule that binds to albumin is a serum albumin-binding peptide.

[0034] In some aspects, the peptide complex further comprises a cell-penetrating peptide. In some aspects, the cell-penetrating peptide comprises a sequence of any one of SEQ ID NO: 249-SEQ ID NO: 341.

[0035] In various aspects, the present disclosure provides a pharmaceutical composition comprising any PD-L1-binding peptide described herein, or any peptide complex described herein, and a pharmaceutically acceptable carrier.

[0036] In various aspects, the present disclosure provides a method of inhibiting PD-L1 in a subject, the method comprising: administering to the subject a composition comprising a PD-L1-binding peptide, the PD-L1-binding peptide comprising at least six cysteine residues, and at least three disulfide bonds connecting the at least six cysteine residues; binding the PD-L1-binding peptide to PD-L1 on a PD-L1 positive cell; and inhibiting the PD-L1.

[0037] In some aspects, the at least six cysteine residues are located at amino acid positions n, n+4, n+14, n+28, n+38, and n+42, where n corresponds to an amino acid position of a first cysteine residue of the at least six cysteine residues. In some aspects, amino acid position n corresponds to amino acid position 4, such that the at least six cysteine amino acid residues are located at amino acid positions 4, 8, 18, 32, 42, and 46.

[0038] In various aspects, the present disclosure provides a method of inhibiting PD-L1 in a subject, the method comprising: administering to the subject a composition comprising any PD-L1-binding peptide described herein; binding the PD-L1-binding peptide to PD-L1 on a PD-L1 positive cell; and inhibiting the PD-L1.

[0039] In some aspects, inhibiting PD-L1 comprises inhibiting binding of PD-1 to PD-L1. In some aspects, the method further comprises reducing immunosuppression, reducing T cell exhaustion, restoring immune function, or a combination thereof. In some aspects, the method further comprises treating a condition in the subject. In some aspects, the condition is cancer, and wherein the PD-L1 positive cell is a cancer cell. In some aspects, treating the cancer comprises enhancing an immune response against the cancer cell.

[0040] In various aspects, the present disclosure provides a method of delivering an active agent to a PD-L1 positive cell of a subject, the method comprising: administering to the subject a peptide complex comprising a PD-L1-binding peptide complexed with an active agent, the PD-L1-binding peptide comprising at least six cysteine residues, and at least three disulfide bonds connecting the at least six cysteine residues; binding the PD-L1-binding peptide to a PD-L1 positive cell; and delivering the active agent to the PD-L1 positive cell.

[0041] In some aspects, the at least six cysteine residues are located at amino acid positions n, n+4, n+14, n+28, n+38, and n+42, where n corresponds to an amino acid position of a first cysteine residue of the at least six cysteine residues. In some aspects, amino acid position n corresponds to amino acid position 4, such that the at least six cysteine amino acid residues are located at amino acid positions 4, 8, 18, 32, 42, and 46.

[0042] In various aspects, the present disclosure provides a method of delivering an active agent to a PD-L1 positive cell of a subject, the method comprising: administering to the subject a peptide complex comprising any PD-L1-binding peptide described herein complexed with an active agent, or the peptide complex of any one of claims 39-107; binding the PD-L1-binding peptide to a PD-L1 positive cell; and delivering the active agent to the PD-L1 positive cell.

[0043] In some aspects, the active agent comprises an anti-cancer agent, a chemotherapeutic agent, a radiotherapy agent, or a proinflammatory cytokine. In some aspects, the active agent comprises an oligonucleotide. In some aspects, the peptide complex remains intact after incubation in human serum. In some aspects, the PD-L1-binding peptide binds to PD-L1 with equilibrium dissociation constant (K_{D}) of no more than 10 nM, 5 nM, 1 nM, 800 pM, 600 pM, 500 pM, 400 pM, 300 pM, 250 pM, or 200 pM when complexed with the oligonucleotide.

[0044] In some aspects, the method further comprises binding the oligonucleotide to a target sequence upon delivery to the PD-L1 positive cell. In some aspects, the method further comprises modulating alternative splicing of the target sequence, dictating the location of a polyadenylation site of the target sequence, inhibiting translation of the target sequence, inhibiting binding of the target sequence to a secondary target sequence, recruiting RISC to the target sequence, recruiting RNaseH1 to the target sequence, inducing cleavage of the target sequence, or regulating the target sequence upon binding of the oligonucleotide to the target sequence. In some aspects, the active agent comprises an anti-inflammatory cytokine, a steroid, a glucocorticoid, a corticosteroid, or a nonsteroidal anti-inflammatory drug. In some aspects, the active agent comprises an immune cell targeting agent.

[0045] In some aspects, the method further comprises binding the immune cell targeting agent to an immune cell and recruiting the immune cell to the PD-L1 positive cell. In some aspects, recruiting the immune cell to the PD-L1-positive cell comprises forming an immunological synapse. In some aspects, the immunological synapse has a width of from 3 nm to 25 nm, from 5 nm to 20 nm, or from 10 nm to 15 nm. In some aspects, the immunological synapse has a width of no greater than 3 nm, no greater than 5 nm, no greater than 8 nm, no greater than 10 nm, no greater than 13 nm, no greater than 15 nm, no greater than 18 nm, no greater than 20 nm, no greater than 23 nm, no greater than 25 nm, no greater than 30 nm, no greater than 35 nm, no greater than 40 nm, no greater than 45 nm, or no greater than 50 nm.

[0046] In some aspects, the immune cell comprises a T cell, a B cell, a macrophage, a natural killer cell, a fibroblast, a regulatory T cell, a regulatory immune cell, a neural stem cell, or a mesenchymal stem cell. In some aspects, the immune cell targeting agent binds CD3, 4-1BB, CD28, CD137, CD89, CD16, CD25, CD13, CD29, CD44, CD71, CD73, CD90, CD105, CD166, CD27, GITR, TIGIT, LAG3, TCR, CD40L, OX40, PD-1, CTLA-4, or STRO-1. In some aspects, the immune cell targeting agent binds CD3. In some aspects, the immune cell targeting agent binds CD25. In some aspects, the immune cell targeting agent binds 4-1BB. In some aspects, the immune cell targeting agent binds CD28.

[0047] In some aspects, the method further comprises killing the PD-L1 positive cell upon delivery of the immune cell to the PD-L1 positive cell. In some aspects, the method further comprises suppressing the PD-L1 positive cell upon delivery of the immune cell to the PD-L1 positive cell. In some aspects, the immune cell targeting agent comprises a single chain variable fragment (scFv), a cysteine-dense peptide, an avimer, a kunitz domain, an affibody, an adnectin, a nanofittin, a fynomer, a ß-hairpin, a stapled peptide, a bicyclic peptide, an antibody, an antibody fragment, a protein, a peptide, a peptide fragment, a binding domain, a small molecule, or a nanobody.

[0048] In some aspects, the immune cell targeting agent is fused to a first heterodimerization domain and the PD-L1-binding peptide is fused to a second heterodimerization domain. In some aspects, the first heterodimerization domain complexes with the second heterodimerization domain to form a heterodimer. In some aspects, the first heterodimerization domain, the second dimerization domain, or both comprises a Fc domain.

[0049] In some aspects, the immune cell targeting agent is linked to the PD-L1-binding peptide via a linker. In some aspects, the immune cell targeting agent is linked to the PD-L1-binding peptide via an Fc domain. In some aspects, the immune cell targeting agent and the PD-L1-binding peptide form a single polypeptide chain

[0050] In some aspects, the peptide complex comprises a chimeric antigen receptor. In some aspects, the active agent comprises a transmembrane domain, an intracytoplasmic domain, or a combination thereof. In some aspects, the peptide complex further comprises a T cell. In some aspects, the method further comprises delivering the T cell to the PD-L1 positive cell. In some aspects, the method further comprises killing the PD-L1 positive cell.

[0051] In some aspects, the method further comprises treating a condition in the subject. In some aspects, the condition is cancer. In some aspects, the PD-L1 positive cell is a cancer cell. In some aspects, the cancer comprises melanoma, skin cancer, non-small cell lung cancer, small cell lung cancer, renal cancer, esophageal cancer, oral cancer, hepatocellular cancer, ovarian cancer, cervical cancer, colorectal cancer, colon cancer, rectal cancer, head and neck cancer, lymphoma, bladder cancer, liver cancer, gastric cancer, stomach cancer, breast cancer, triple negative breast cancer, pancreatic cancer, prostate cancer, Merkel cell carcinoma, mesothelioma, brain cancer, or a PD-L1-expressing cancer. In some aspects, the brain cancer comprises glioblastoma, astrocytoma, meningioma, primary brain cancer, metastatic brain cancer, a PDL1-expressing cancer, or a metastatic brain cancer.

[0052] In some aspects, the condition is hyperglycemia, type 1 diabetes, or type 2 diabetes. In some aspects, the PD-L1 positive cell comprises a pancreatic beta cell. In some aspects, the immune cell is a regulatory T cell, and wherein recruitment of the regulatory T cell to the pancreatic beta cell protects the pancreatic beta cell, and prevents, mitigates effect of, reduces symptoms of, slows onset of the hyperglycemia, the type 1 diabetes, or the type 2 diabetes in the subject, thereby treating the hyperglycemia, the type 1 diabetes, or the type 2 diabetes.

[0053] In some aspects, the condition is an autoimmune or inflammatory disorder. In some aspects, the PD-L1 positive cell comprises a pancreatic beta cell. In some aspects, the immune cell comprises a regulatory T cell or a mesenchymal stem cell. In some aspects, the immune cell targeting agent binds CD25, CD13, CD29, CD44, CD71, CD73, CD90, CD105, CD166, or STRO-1. In some aspects, upon recruitment to PD-L1 positive cell, the immune cell inhibits an autoimmune or inflammatory response, thereby treating the autoimmune or inflammatory disorder. In some aspects, the autoimmune or inflammatory disorder comprises rheumatoid arthritis, atherosclerosis, ischemia-reperfusion injury, colitis, psoriasis, lupus, inflammatory bowel disease, Crohn's disease, ulcerative colitis, multiple sclerosis, type 1 diabetes, type 2 diabetes, or neuroinflammation.

[0054] In some aspects, the PD-L1-binding peptide binds to PD-L1 with an equilibrium dissociation constant (K_{D}) of not greater than 100 nM, not greater than 50 nM, not greater than 1 nM, not greater than 500 pM, not greater than 300 pM, not greater than 250 pM, or not greater than 200 pM.

### INCORPORATION BY REFERENCE

[0055] All publications, patents, and patent applications mentioned in this specification are herein incorporated by reference to the same extent as if each individual publication, patent, or patent application was specifically and individually indicated to be incorporated by reference.

### BRIEF DESCRIPTION OF THE DRAWINGS

[0056] The novel features of the invention are set forth with particularity in the appended claims. A better understanding of the features and advantages of the present invention will be obtained by reference to the following detailed description that sets forth illustrative embodiments, in which the principles of the invention are utilized, and the accompanying drawings of which:

[0057] FIG. 1A-FIG. 1D illustrate mammalian display and library screening methods for selection of cystine dense peptide (CDP) scaffolds for PD-L1-binding peptides.

[0058] FIG. 1A schematically illustrates a general mammalian surface display screening method using lentiviral vectors to screen for target-binding properties or to assess peptide quality (right, “Vector SDPR”). Mammalian cells, such as HEK 293F cells, express and display GFP-tagged cystine dense peptides (CDPs) from a library of CDPs. In a first assay (left, “Vector SDGF”), CDPs are screened for binding to a fluorescently labeled target protein (e.g., a biotinylated protein labeled with a fluorescent streptavidin). Cells are sorted based on co-stain fluorescence to select for CDPs that bind to the target protein. In a second assay, tagged CDPs from the CDP library are assessed for quality. Tagged CPDs (e.g., CDPs with a 6×His tag (SEQ ID NO: 248)) that are intact are labeled with a co-stain (e.g., a fluorescently labeled anti-6×His antibody). Cells are sorted based on co-stain fluorescence to select for CDPs that are expressed and displayed in-tact.

[0059] FIG. 1B shows a histogram distribution of the surface folding scores for CDPs from a taxonomically diverse CDP library. The top scoring CDPs (N=953), corresponding to cystine scaffolds predicted to have high surface expression, protease resistance, or both, were selected for further analysis.

[0060] FIG. 1C schematically illustrates a system used to identify members for a new CDP library. The approximately 100,000 curated CDP sequences were searched for CDPs with sequence homology or cysteine pattern homology to the top scoring CDPs identified in FIG. 1B. The resulting second-generation optimized library (“Gen 2 Library”) contained 8,893 CDPs.

[0061] FIG. 1D shows a flow-based comparison of CDP stability between a first-generation diversified CDP library and the second-generation optimized CDP library identified in FIG. 1C and containing peptides with homology to predicted high stability CDP scaffolds. Cells SDPR-cloned with 6×His-tagged (SEQ ID NO: 248) CDPs from either the diversified (left) or optimized (right) library were treated with 5 μg/mL trypsin (thin solid line), 20 μg/mL trypsin (bold solid line), or PBS (dashed line, “No Trypsin”) for 5 minutes. Cells were subsequently treated with DTT for 5 minutes and stained with a fluorescent anti-6×His antibody. Histogram distributions of CDPs were normalized to the mode. The optimized library showed improved surface expression and protease resistance over the diversified library.

[0062] FIG. 2A-FIG. 2C illustrate selection of various PD-L1-binding peptides that align with three-dimensional structure, computational modeling and phylogeny resulting in high confidence for selection of PD-L1-binding peptides with PD-L1 binding activity.

[0063] FIG. 2A schematically illustrates a structural modeling pipeline used to predict three-dimensional structure and disulfide pairing of members of an optimized CDP library. I-TASSER version 5.1 modeling software was used to create a structural model from a CDP sequence. The likeliest disulfide pairings were determined by minimizing the average pairwise distances between bonded cysteine sulfur atoms in the structural model. Rosetta ForceDislufides program relaxed the disulfide-bonded structures with an all-atom refinement and repacking algorithm to minimize steric clashes.

[0064] FIG. 2B shows representative alignments of crystal structures and computational models, obtained as described in FIG. 2A, for twenty CDPs from an optimized CDP library. The crystal structures of these CDPs were not included in the structural database used for computational modeling. Crystal structures available from the RCSB Protein Data Bank are referenced by PDB ID number. Root-mean-square deviations (RMSDs) of the alignment between the crystal structure and the modeled structure are provided below the PDB ID number or the SEQ ID NO. For crystal structures with multiple polypeptide chains in the asymmetric unit, the RMSD represents the average alignment between the modeled structure and each polypeptide in the asymmetric unit.

[0065] FIG. 2C shows a graphical comparison of the root-mean-square deviation (RMSD) of the twenty CDP alignments shown in FIG. 2B. The computational model aligned to an asymmetric unit (AU) of the crystal structure with an average RMSD of 0.924 Å (left circles). Different asymmetric units of the crystals aligned to each other with an average RMSD of 0.333 Å (right circles), providing a quantitative assessment of the accuracy of the models used in FIG. 2A and FIG. 2B.

[0066] FIG. 3 shows a structural model of center of mass clusters (mesh cages denoted with arrows) of CDP library peptides docked to programmed death-ligand 1 (PD-L1). PD-1 bound to PD-L1 is shown as a ribbon structure based on its crystal structure (PDB ID NO: 4ZQK; Zak et al., Structure 23, 2341-2348 (2015)). These center of mass clusters are examples of where PD-L1 binding peptides may bind to PD-L1. A center of mass cluster located near the PD-1 binding site is denoted by an unfilled arrow. Any of these PD-L1 binding peptides may modulate the activity of PD-1 on its receptor PD-L1, including through steric or direct effects, with those binding on or near the PD-1 binding site potentially directly inhibiting PD-1 binding at the PD-L1 active site.

[0067] FIG. 4A and FIG. 4B illustrate the selection of various PD-L1-binding peptides that align with crystal structure, computational modeling, and phylogeny, resulting in high confidence for PD-L1-binding cystine dense peptides with PD-L1 binding activity. PD-L1-binding cystine dense peptides were tested as shown.

[0068] FIG. 4A shows a plot of Rosetta energy of dock scores for various docked PD-L1-binding cystine dense peptides plotted against the solvent accessible surface area (SASA) of the CDP scaffolds. Each point, representing a peptide docked to the PD-L1 structure, is color-coded based on the dominant structural element (e.g., coil, α-helix, or ß-sheet) in the scaffold. Gray points correspond to coil-rich CDPs, darker points and solid triangles correspond to helix-rich CDPs, and light points and open triangles correspond to sheet-rich CDPs. Triangles denote CDPs identified as binding hits, as determined by staining with fluorescently labeled PD-L1 and flow sorting, enriching for peptides that bind well to PD-L1. Four triangles are shown, with two nearly overlapping. Light gray shading, corresponding to PD-L1-binding peptide clusters with a dock cluster score of less than approximately 26 at the PD-1-binding interface, represents scaffolds from the optimized library that were used to generate a docking-enriched Met/Tyr scanning (DEMYS) library. Dark gray shading, corresponding to peptide clusters with a dock cluster score of about a median 50% of scores representing scaffolds not predicted to bind well with PD-L1, which in fact did not bind well as determined by staining with fluorescently labeled PD-L1 and flow sorting. These results indicate that the PD-L1-binding peptides selected and enriched for binding have an increased potential for binding PD-L1 and PD-L1-binding peptide utility as described herein.

[0069] FIG. 4B illustrates a phylogenetic tree showing the taxonomical diversity of high-scoring PD-L1-binding CDPs predicted to dock with PD-L1 near the PD-1-binding interface, having center of mass cluster for PD-L1 binding peptides located near the PD-1 binding site, and having a high utility to bind PD-L1 and to disrupt PD-1 interaction.

[0070] FIG. 5A-FIG. 5F illustrate enrichment and binding of PD-L1-binding peptides to PD-L1 for PD-L1-binding peptides expressed in mammalian display systems.

[0071] FIG. 5A illustrates a workflow (top) for seeding novel protein:protein interactions using docking-enriched methionine (M)-tyrosine (Y) scanning (DEMYS). This shows an example of how DEMYS enrichment further diversifies the optimized library and change residues from hydrophilic to hydrophobic residues, in this case methionine (M) and tyrosine (Y), in the reference sequence. A sample scaffold to which DEMYS was applied is also shown (bottom). The sample scaffold is color coded by hydrophobicity such that lightest shading indicates carbon atoms not contacting a polar atom, intermediate shading indicates acidic atoms, darker shading indicates basic atoms, and the remaining atoms are shown in white. The reference sequence scaffold, which would not be expected to bind well to PD-L1 but shows how the method of diversifying the library, is shown in its parental form (SEQ ID NO: 356), along with three examples of Met or Tyr mutations corresponding to D18M (SEQ ID NO: 5), R26Y (SEQ ID NO: 6), and R36M (SEQ ID NO: 7).

[0072] FIG. 5B shows results of an optimized CDP library fluorescence-based mammalian display screen. Results are plotted as PD-L1 bound versus CDP expression. Cells displaying CDPs that bound to PD-L1 are indicated by a box.

[0073] FIG. 5C shows results of the optimized library further diversified using a docking-enriched methionine-tyrosine scanning (DEMYS) CDP library fluorescence-based mammalian display screen. Results are plotted as PD-L1 bound versus CDP expression. Cells displaying CDPs that bound to PD-L1 are indicated by a box.

[0074] FIG. 5D illustrates structural model of a CDP scaffold parent of SEQ ID NO: 4, identified in the optimized CDP library mammalian display screen shown in FIG. 5B.

[0075] FIG. 5E shows a flow plot, plotted as CDP expression versus co-stain fluorescence, for a transiently transfected SDGF-cloned CDP, corresponding to SEQ ID NO: 4, identified in the PD-L1 mammalian display screen shown in FIG. 5B. Dark gray lines correspond to staining in the presence of PD-L1. Light gray lines correspond to staining in the absence of PD-L1.

[0076] FIG. 5F shows flow plots, plotted as CDP expression versus co-stain fluorescence, for four transiently transfected SDGF-cloned CDPs, corresponding to SEQ ID NO: 4 (top left), SEQ ID NO: 57 (top right), SEQ ID NO: 58 (bottom left), and SEQ ID NO: 59 (bottom right), identified in the PD-L1 DEMYS library screen shown in FIG. 5C. Dark gray lines correspond to staining in the presence of PD-L1. Light gray lines correspond to staining in the absence of PD-L1. These data show that SEQ ID NO: 4, SEQ ID NO: 57, SEQ ID NO: 58, and SEQ ID NO: 59 bind to PD-L1 and that the PD-L1 DEMYS library yielded more molecules that bind PD-L1 than the optimized library yielded.

[0077] FIG. 6A-FIG. 6C illustrate structural and competitive binding aspects of PD-L1-binding peptides binding to PD-L1. This data shows that SEQ ID NO: 4 is competitive with PD-1 and that it binds human and cynomolgus monkey PD-L1.

[0078] FIG. 6A shows a structural model of the binding interface between the top 200 PD-L1-binding peptides (mesh), identified in the optimized CDP library screen shown in FIG. 5B, docked to PD-L1. The surface rendition is color-coded for cynomolgus monkey (left) and mouse (right) homology. PD-1 bound to PD-L1 is shown as a ribbon structure.

[0079] FIG. 6B graphically illustrates the results of a competition assay to assess the ability of a PD-L1-binding CDP, corresponding to SEQ ID NO: 4, to disrupt PD-1 interactions with PD-L1. HEK 293F cells surface-expressing SEQ ID NO: 4 via SDGF were stained with fluorescently labeled PD-L1. Staining was compared in the presence of 50 nM, 150 nM, 500 nM, 1.5 μM, 5 μM, or 15 μM of a PD-1 competitor Fc fusion protein (striped bars) or in the presence of 50 nM, 150 nM, 500 nM, 1.5 μM, 5 μM, or 15 μM of a control Fc fusion protein (dotted bars).

[0080] FIG. 6C shows a flow staining assay of cells surface-expressing SEQ ID NO: 4 binding to either human (darkest gray lines), cynomolgus monkey (lightest gray lines, “Cyno”), or mouse (intermediate gray lines) PD-L1.

[0081] FIG. 7A-FIG. 7C illustrate identification and enrichment of high affinity binders of the PD-L1-binding peptides using site saturated mutagenesis and flow sorting for binding to PD-L1.

[0082] FIG. 7A shows a first round of flow sorting of site-saturation mutagenesis (SSM) variants of SEQ ID NO: 4. Cells surface displaying CDP variants of SEQ ID NO: 4 were stained with fluorescent PD-L1, and flow sorted based on binding to PD-L1.

[0083] FIG. 7B shows a second round of flow sorting of site-saturation mutagenesis (SSM) variants of SEQ ID NO: 4. Cells surface displaying CDP variants of SEQ ID NO: 4 were stained with fluorescent PD-L1, and flow sorted based on binding to PD-L1. The top 7% of PD-L1 binders were further analyzed in FIG. 8.

[0084] FIG. 7C shows flow sorting of site-saturation mutagenesis (SSM) variants of SEQ ID NO: 4 stained with co-stain only in the absence of PD-L1.

[0085] FIG. 8 shows an exemplary affinity maturation heat map of SEQ ID NO: 4 variants to identify high performance residues and point mutations within PD-L1-binding peptides. The heat map was used to identify PD-L1-binding peptides, including SEQ ID NO: 3, with high affinity for PD-L1. Shading corresponds to the relative enrichment of each amino acid point mutation (vertical axis) relative to SEQ ID NO: 4 (horizontal axis). Lighter shaded squares indicate more (positive) enrichment, and darker shaded squares indicate depletion. That is, lighter shaded squares indicate sequences whose relative abundance increased after two rounds of selection for PD-L1 binding, indicating improved binding relative to that of SEQ ID NO: 4 and darker shaded squares indicate sequences whose relative abundance decreased after two rounds of selection for PD-L1 binding, indicating disruption of binding relative to that of SEQ ID NO: 4. A binary color map of this data indicating residues with positive enrichment is provided in FIG. 21 and quantification of enrichment data is provided in TABLE 12. The heat map represents log₂-transformed enrichment of each variant after two rounds of sorting and regrowth, normalized to both initial variant abundance and performance of SEQ ID NO: 4 itself. Positive enrichment scores represent increased relative abundance and therefore improved binding. Sequences of the parental scaffold (SEQ ID NO: 353), a primary hit (SEQ ID NO: 4), and an affinity matured variant (SEQ ID NO: 3) are provided below the heat map. Mutations are color coded based on benefit or likely passenger status. Asterisk indicates novel N-linked glycosites. “Beneficial in SEQ ID NO: 3” indicates those point mutations that were combined and included in SEQ ID NO: 3 to increase affinity of SEQ ID NO: 3 for PD-L1 relative to SEQ ID NO: 4. “Omitted in SEQ ID NO: 3” indicates a point mutation that appeared beneficial in isolation but, when combined with other beneficial point mutations, became disruptive to binding. This point mutation was omitted in SEQ ID NO: 3. “Disruptive reversions” indicate point mutations that, when reverted to the parent amino acid, reduced binding, indicating that those point mutations in SEQ ID NO: 4 were beneficial to PD-L1 binding. “Neutral reversions” indicate reversions to the parental amino acid present in SEQ ID NO: 353 that do not impact binding to PD-L1, showing that these mutations were acquired during library generation but were not instrumental to SEQ ID NO: 4 binding to PD-L1. Such neutral reversions are also referred to as passenger mutations.

[0086] FIG. 9 shows a comparison of PD-L1 binding for six PD-L1-binding cystine dense peptides containing amino acid substitutions enriched in the affinity maturation assay shown in FIG. 8. Cystine dense peptides contained either all six of the amino acid substitutions E11W, A13M, Y15G, I22N, Y36K, and W40F (SEQ ID NO: 8, “All 6”) relative to SEQ ID NO: 4, or five of the six substitutions (SEQ ID NO: 9-SEQ ID NO: 14, corresponding to reversion mutants W11E, M13A, G15Y, N22I, K36Y, and F40W, respectively). Staining was performed as either one step (solid bars) or two steps (striped bars). Reversion mutants W11E (SEQ ID NO: 9), G15Y (SEQ ID NO: 11), and K36Y (SEQ ID NO: 13) showed increased affinity for PD-L1 relative to SEQ ID NO: 8, indicating that the corresponding reversions were beneficial to PD-L1-binding relative to that of SEQ ID NO: 8 (“All 6”).

[0087] FIG. 10A-FIG. 10D illustrate production, purity, purification, stability, and PD-L1-binding affinity of PD-L1-binding cystine dense peptides.

[0088] FIG. 10A shows reversed phase high-performance liquid chromatography (RP-HPLC) chromatograms (top) and SDS-PAGE gels (bottom) of three recombinant PD-L1-binding cystine dense peptides (SEQ ID NO: 4, SEQ ID NO: 3, and SEQ ID NO: 1). RP-HPLC and SDS-PAGE assays were performed under non-reducing (NR) conditions or in the presence of 10 mM DTT. The arrow in the RP-HPLC chromatogram indicates a minor species possibly representing glycosylated SEQ ID NO: 3. This data illustrates successful production, purity, purification and disulfide bond formation of SEQ ID NO: 4, SEQ ID NO: 3, and SEQ ID NO: 1. The RP-HPLC data also illustrates that the matured SEQ ID NO: 3 and SEQ ID NO: 1 undergo less unfolding upon exposure to DTT than the original hit SEQ ID NO: 4.

[0089] FIG. 10B shows liquid chromatography-mass spectrometry (LC-MS) data for three recombinant PD-L1-binding cystine dense peptides (SEQ ID NO: 4, SEQ ID NO: 3, and SEQ ID NO: 1). This data validates the identity of the foregoing PD-L1-binding peptides based on the predicted molar mass of the CDPs and that that cystine disulfide bonds indicative of a CDP structure were formed, as the DTT-treated (reducing conditions) peptides showed an increase of approximately 6 Da in mass.

[0090] FIG. 10C shows surface plasmon resonance (SPR) plots for three recombinant PD-L1-binding cystine dense peptides (SEQ ID NO: 4, SEQ ID NO: 3, and SEQ ID NO: 1). SEQ ID NO: 4 bound PD-L1 with an equilibrium dissociation constant (K_{D}) of 39.6±0.3 nM, SEQ ID NO: 3 bound PD-L1 with K_{D}=160±1 pM (kₐ=1.25±0.01×10⁸ M⁻¹ s, k_{d}=2.00±0.01×10⁻² s⁻¹), and SEQ ID NO: 1 bound PD-L1 with K_{D}=202±2 pM (kₐ=9.73±0.06×10⁷ M⁻¹ s, k_{d}=1.96±0.01×10⁻² s⁻¹). This data illustrates that SEQ ID NO: 4, SEQ ID NO: 3, and SEQ ID NO: 1 bind PD-L1 with high affinity. These data also show that the matured variant binders, SEQ ID NO: 1 and SEQ ID NO: 3, bind PD-L1 with a higher affinity than SEQ ID NO: 4 from which they were derived.

[0091] FIG. 10D shows an SPR plot of SEQ ID NO: 1 competing with PD-1 for binding to PD-L1. PD-1 (SEQ ID NO: 349) binding to PD-L1 was compared in the absence of SEQ ID NO: 1 or in the presence of 0.6 μM or 3 μM SEQ ID NO: 1. This data illustrates that SEQ ID NO: 1 is able to compete with PD-1 for binding to PD-L1.

[0092] FIG. 11 schematically illustrates two exemplary bispecific immune cell engager (BiICE) complexes capable of engaging T-cells by bispecifically binding to PD-L1 and to CD3. The CDP-based BiICE (“CS-BiICE”) is formed from a first fusion protein (SEQ ID NO: 342) containing a PD-L1-binding CDP (SEQ ID NO: 2) with an N-terminal signal peptide (SEQ ID NO: 247; “SP”) and FLAG tag (DYKDEGGS; SEQ ID NO: 246) fused to an Fc “hole” sequence via a linker and a second fusion protein (SEQ ID NO: 347) containing an anti-CD3 single-chain fragment variable (scFv) fused to an Fc “knob” sequence with an N-terminal signal peptide and C-terminal 6×His tag (SEQ ID NO: 248). The “hole” sequence heterodimerizes with the “knob” sequence. The scFv-based BiICE (“SS-BiICE”) is formed from a first fusion protein (SEQ ID NO: 346) containing an anti-PD-L1 scFc with an N-terminal signal peptide and FLAG tag fused to an Fc “hole” sequence and a second fusion protein (SEQ ID NO: 347) containing an anti-CD3 single-chain fragment variable (scFv) fused to an Fc “knob” sequence with an N-terminal signal peptide and C-terminal 6×His tag (SEQ ID NO: 248). Sequence organization of the CS-BiICE and SS-BiICE components are shown in the top panel. Structural organization of the heterodimerized CS-BiICE and SS-BiICE are shown in the bottom panel.

[0093] FIG. 12 shows the results of a fluorescence-based binding assay to assess the cross-reactivity of various PD-L1 binding moieties with different PD-L1 orthologs. Cells expressing surface-tethered PD-L1 binding moieties, including a PD-L1-binding cystine dense peptide (SEQ ID NO: 3), a single-chain fragment variable (scFv) derived from an anti-PD-L1 antibody (SEQ ID NO: 345), or an scFv derived from the anti-PD-L1 drug atezolizumab (SEQ ID NO: 348), were stained with either human, cynomolgus monkey (“Cyno”), or mouse his-tagged PD-L1 orthologs and co-stained with anti-His-iFluor647 antibody. Anti-His-iFluor647 antibody alone (“Costain only”) was used as a comparison. Co-stain fluorescence of cells is shown on the horizontal axis. This data shows that SEQ ID NO: 3 binds human and cynomolgus monkey PD-L1 but not mouse PD-L1, SEQ ID NO: 345 binds human PD-L1 but not cynomolgus monkey or mouse PD-L1, and that SEQ ID NO: 348 binds human, cynomolgus monkey, and mouse PD-L1 to various extents.

[0094] FIG. 13A-FIG. 13D illustrate production, purity, purification, and binding to PD-L1 of BiICE complexes containing either PD-L1-binding cystine dense peptide or a PD-L1-binding scFv.

[0095] FIG. 13A shows an SDS-PAGE gel of a purified CS-BiICE molecule (SEQ ID NO: 342 heterodimerized with SEQ ID NO: 347). Separate bands corresponding to heterodimer (H) and anti-CD3-scFv-Fc monomer (M) were seen under non-reducing (NR) conditions. Separate bands corresponding to CDP-Fc and scFv-Fc species were seen under reducing conditions (DTT). This data indicates successful production, purity, purification, heterodimer formation, and disulfide bonding of a CDP-based BiICE.

[0096] FIG. 13B shows SPR measurements of CS-BiICE binding to PD-L1. The CS-BiICE bound to PD-L1 with a K_{D} of 11.2 nM (kₐ=5.42×10⁵ M⁻¹ s, k_{d}=6.07±0.01×10⁻³ s⁻¹). This data indicates that the CDP-based BiICE binds PD-L1 with high affinity.

[0097] FIG. 13C show an SDS-PAGE gel of a purified SS-BiICE molecule (SEQ ID NO: 346 heterodimerized with SEQ ID NO: 347). Separate bands corresponding to heterodimer (H) and anti-CD3-scFv-Fc monomer (M) were seen under non-reducing (NR) conditions. A single band corresponding to scFv-Fc species was seen under reducing conditions (DTT). This data indicates successful production, purity, dimer formation, and purification of an scFv-based BiICE.

[0098] FIG. 13D shows SPR measurements of SS-BiICE binding to PD-L1. The SS-BiICE bound to PD-L1 with a K_{D} of 65 nM. This data indicates that the scFv BiICE binds to PD-L1 with lower affinity than the CDP-based BiICE shown in FIG. 13B.

[0099] FIG. 14A-FIG. 14E illustrate validation of PD-L1-binding BiICE complexes by binding to T-cells and inducing tumor cell death.

[0100] FIG. 14A shows flow staining of human primary T cells from patient derived peripheral blood mononuclear cells (PMBCs) using CS-BiICE and SS-BiICE molecules. Cells co-stained with a fluorescent anti-6×His antibody. Co-stain alone was included as a control. Both CS-BiICE and SS-BiICE showed increased staining over co-stain alone, indicating T cell binding. This data indicates that PD-L1/CD3-binding CS-BiICE and SS-BiICE molecules were able to bind to T-cells via CD3.

[0101] FIG. 14B shows the results of a human T-cell killing assay in a PC3 cancer cell line with increasing concentrations of CS-BiICE or SS-BiICE. CS-BiICE induced T-cell killing with a half maximal effective concentration (EC50) of 28 pM in PD-L1-expressing (“WT”) PC3 cells. SS-BiICE induced T-cell killing with an EC50 of 97 pM in PD-L1-expressing (“WT”) PC3 cells. The T-cell killing assay was also performed in PD-L1 knock out (KO) PC3 cells. T-cell killing was lower in PD-L1 KO cells than in WT cells for both CS-BiICE and SS-BiICE. This data indicates that CS-BiICE and SS-BiICE molecules were able to recruit T-cells to cancer cells and induce cancer cell death in PC3 cells in a PD-L1-dependent manner. This data also indicates that CS-BiICE was more potent at inducing cancer cell death than SS-BiICE.

[0102] FIG. 14C shows the results of a human T-cell killing assay in an MDA-MB-231 cancer cell line with increasing concentrations of CS-BiICE or SS-BiICE. CS-BiICE induced T-cell killing with an EC50 of 142 pM. SS-BiICE induced T-cell killing with an EC50 of 333 pM. This data indicates that CS-BiICE and SS-BiICE molecules were able to recruit T-cells to cancer cells and induce cancer cell death in MDA-MB-231 cells. This data also indicates that CS-BiICE was more potent at inducing cancer cell death than SS-BiICE.

[0103] FIG. 14D shows the results of a human T-cell killing assay in a PBT-05 cancer cell line with increasing concentrations of CS-BiICE or SS-BiICE. CS-BiICE induced T-cell killing with an EC50 of 2.4 pM. SS-BiICE induced T-cell killing with an EC50 of 7.7 pM. This data indicates that CS-BiICE and SS-BiICE molecules were able to recruit T-cells to cancer cells and induce cancer cell death in PBT-05 cells. This data also indicates that CS-BiICE was more potent at inducing cancer cell death than SS-BiICE.

[0104] FIG. 14E schematically illustrates a representative BiICE facilitating contact between an T cell and a cancer cell, enabling the T-Cell to kill the cancer cell. The immunological synapse is narrow enough to enable signal exchange between the targeted cell, engaged by the PD-L1-binding peptide, and the targeted immune cell, engaged by the immune cell binding moiety, such as an anti-CD3 moiety, resulting in an immune response against the cancer cell. In this example SEQ ID NO: 2 is used. It is understood that any PD-L1-binding peptide (e.g., any one of SEQ ID NO: 1-SEQ ID NO: 118) may be used with an immune cell binding moiety (e.g., any one of SEQ ID NO: 122 or SEQ ID NO: 422-SEQ ID NO: 491) to make a BiICE resulting in an immune response against the targeted cancer.

[0105] FIG. 15A and FIG. 15B illustrate additional purification of SS-BiICE and CS-BiICE complexes and induction of tumor cell death via T-cell recruitment.

[0106] FIG. 15A shows SDS-PAGE gels of IMAC purified and extra-purified (IMAC and FLAG) BiICE preparations. Purified SS-BiICE preparations are shown on the left, and purified CS-BiICE preparations are shown on the right. This data indicates that additional FLAG purification removed an impurity, anti-CD3-scFv-Fc monomer, present in SS-BiICE and CS-BiICE preparations following IMAC purification.

[0107] FIG. 15B shows the results of a human T-cell killing assay in a PC3 cancer cell line with varying concentrations of standard purified (IMAC) or extra-purified (IMAG+FLAG) CS-BiICE or SS-BiICE. Extra-purified BiICE preparations underwent FLAG purification in addition to IMAC purification. T-cell killing activity was retained following the additional FLAG purification step. This data indicates that T-cell recruitment and tumor cell killing properties of SS-BiICE and CS-BiICE complexes were retained following removal of impurities by an additional purification step, and that the tumor cell killing was due to the function of the heterodimeric BiICE molecules not due to the impurity.

[0108] FIG. 16A-FIG. 16H illustrate the ability of PD-L1-binding CDP-based BiICE complexes to shrink tumors and increase cancer survival rates in vivo.

[0109] FIG. 16A shows an experimental timeline for an in vivo tumor shrinking assay. Nude mice were implanted with PC3 or MDA-MB-231 tumors. Day zero was set as the day on which tumors reached 100-200 mm² in size. Mice were received four treatments of either SS-BiICE or CS-BiICE on days 1, 4, 8, and 11 and two treatments of activated human T-cells on days 2 and 7. Tumor size and mortality were tracked up to Day 95 and compared with control groups receiving vehicle only or T cells only.

[0110] FIG. 16B shows the survival probabilities of the first cohort of mice implanted with PC3 tumors and treated as described in FIG. 16A. This data indicates that CS-BiICE complexes significantly increased probability of survival in vivo for mice with implanted PC3 tumors compared to SS-BiICE complexes or to T cells or vehicle alone. ns: not statistically significant. *: P<0.05. **: P<0.01. ***: P<0.001. Unlabeled: P<0.0001. Kaplan-Meier curve P values were determined by log-rank (Mantel-Cox) test.

[0111] FIG. 16C shows tumor sizes of mice implanted PC3 tumors and treated with vehicle only (no T cells, no BiICE, upper left), T cells only (no BiICE, upper right), T cells and SS-BiICE (lower left), or T cells and CS-BiICE (lower right). This data indicates that, while both SS-BiICE and CS-BiICE complexes demonstrated the ability to shrink tumors in vivo, the tumors returned in mice treated with SS-BiICE but not in mice treated with CS-BiICE.

[0112] FIG. 16D shows the survival probabilities of the second cohort of mice implanted with PC3 tumors and treated as described in FIG. 16A, with the exception that two arms were treated with clinical anti-PD-L1 antibody durvalumab in either 1 nmol or 0.1 nmol amounts. An additional arm of CS-BiICE treatment at 0.1 nmol was also included alongside a repeat of 1 nmol CS-BiICE. This data shows that CS-BiICE complexes, at 1 nmol or 0.1 nmol dose, increased probability of survival in vivo for mice with implanted PC3 tumors compared to durvalumab or to vehicle alone. P<0.0001 for 1 nmol and 0.1 nmol CS-BiICE versus vehicle and both durvalumab groups. ns: not statistically significant. Kaplan-Meier curve P values were determined by log-rank (Mantel-Cox) test.

[0113] FIG. 16E shows tumor sizes of mice implanted PC3 tumors and treated with vehicle only (no T cells, no BiICE, upper left), T cells and 1 nmol durvalumab (upper center, “Durva (1)”), T cells and 0.1 nmol durvalumab (upper right, “Durva (0.1)”), T cells and 1 nmol CS-BiICE (lower left, “CS-BiICE (1)”), or T cells and 0.1 nmol CS-BiICE (lower center, “CS-BiICE (0.1)”). This data indicates that the tumors shrank and did not return in the mice treated with 1 nmol or 0.1 nmol CS-BiICE.

[0114] FIG. 16F shows the survival probabilities of mice implanted with MDA-MB-231 tumors and treated as described in FIG. 16A. This data shows that CS-BiICE complexes increased probability of survival in vivo for mice with implanted MDA-MB-231 tumors compared to T cells or vehicle alone. P<0.0001 for CS-BiITE versus vehicle or T cells only. ns: not statistically significant. Kaplan-Meier curve P values were determined by log-rank (Mantel-Cox) test.

[0115] FIG. 16G shows days for tumor volume to triple in size in mice implanted MDA-MB-231 tumors and treated as described in FIG. 16A. This data shows that treatment with CS-BiICE complexes slowed MDA-MB-231 tumor growth in vivo compared to treatment with SS-BiICE complexes or with T cells or vehicle alone. ns: not statistically significant. *: P<0.05. **: P<0.01. ***: P<0.001. Unlabeled: P<0.0001. Kaplan-Meier curve P values were determined by log-rank (Mantel-Cox) test.

[0116] FIG. 16H shows tumor sizes of mice implanted MDA-MB-231 tumors and treated with vehicle only (no T cells, no BiICE, upper left), T cells only (no BiICE, upper right), T cells and SS-BiICE (lower left), or T cells and CS-BiICE (lower right). This data shows that treatment with CS-BiICE complexes slowed MDA-MB-231 tumor growth in vivo compared to treatment with SS-BiICE complexes or with T cells or vehicle alone.

[0117] FIG. 17 shows the weights of mice implanted with PC3 tumors and treated as described in FIG. 16A over the course of the experiment. This data shows that mice treated with CS-BiICE maintained a healthy weight throughout the study. ns: not statistically significant. Kaplan-Meier curve P values were determined by log-rank (Mantel-Cox) test.

[0118] FIG. 18 shows full SDS-PAGE gels of recombinant proteins described herein. Either PBS or 10 mM DTT were included in the sample buffer prior to boiling and loading. All Fc-containing proteins, including knob-and-hole bispecific molecules SS-BiICE and CS-BiICE, contained the IgG1 hinge region between the binder of interest (PD-1, control target, CDP, or scFv) and the Fc domain, which included two cysteines that create a pair of interdomain disulfide bonds between the paired hinge regions. This further stabilized the dimer between the Fc domains in an SDS-stable fashion. Anti-CD3 scFv Fc Knob protein expressed by itself (bottom right) was not a disulfide-stabilized dimer as the knob mutations do not permit stable dimerization and resulting disulfide formation. “*” and “#” denote SDS-PAGE mobility of non-BiICE contaminants in SS-BiICE and CS-BiICE that correspond to monomeric anti-CD3 scFv Fc Knob.

[0119] FIG. 19 illustrates an example of a histidine substitution scan to introduce pH-dependent binding affinity into a target-binding peptide. A histidine substitution scan of a PD-L1-binding CDP (SEQ ID NO: 1) is shown. The peptide sequence is provided above and to the side, and each black box represents a first and second site in which His could be substituted. Those falling along the diagonal from the top-left to the bottom-right represent single His substitutions.

[0120] FIG. 20A shows a co-crystal structure of a high-affinity PD-L1-binding CDP (SEQ ID NO: 1, cartoon) binding to or docked with PD-L1 (surface).

[0121] FIG. 20B shows relative binding enrichment, shown as absolute value of average SSM enrichment, of PD-L1-binding CDP variants containing amino acid substitutions in resolved (R) residues or unresolved (UR) residues, as seen in the co-crystal structure of FIG. 20A. Substitutions at resolved residues had a greater impact, either positive or negative, on binding than substitutions at unresolved residues (**: P=0.0055), showing that resolved played a greater role in interactions with PD-L1 than unresolved residues.

[0122] FIG. 20C shows an overlay of PD-1 (mesh) with SEQ ID NO: 1 (cartoon) at the binding interface with PD-L1 (surface). The PD-1 binding site overlaps with SEQ ID NO: 1, showing that SEQ ID NO: 1 would be expected to compete with PD-1 for binding to PD-L1.

[0123] FIG. 20D shows a zoomed in view of the SEQ ID NO: 1 PD-L1 co-crystal structure of FIG. 20A from two different angles. Residues of SEQ ID NO: 1 that interact with PD-L1, including K5, V9, W12, M13, K16, V39, F40, L43, and D44, are shown as sticks. Residues of PD-L1 that interact with SEQ ID NO: 1, including Y56, Q66, R113, M115, A121, and Y123, are also labeled.

[0124] FIG. 20E shows isolated side chains of select residues in SEQ ID NO: 1 (gray) at the PD-L1-binding interface relative the parent CDP (SEQ ID NO: 353, black, minimally clashing rotamers). Labeled residues of SEQ ID NO: 1, including M13, V39, F40, and L43, correspond to substitutions relative to SEQ ID NO: 353 that improved binding to PD-L1.

[0125] FIG. 20F shows a zoomed in view of the binding interface between SEQ ID NO: 1 (cartoon) and PD-L1 (surface). The PD-L1 surface is color-coded for human (Hs) versus murine (Mm) homology, wherein white corresponds to identical residues, darker shading corresponds to similar residues, and lighter shading corresponds to dissimilar residues. These differences in the binding interface between human and murine PD-L1 are consistent with the lack of murine PD-L1 cross-reactivity seen with SEQ ID NO: 1. Moreover, the data presented in FIG. 6B, FIG. 6C, and FIG. 8 is consistent with the crystal structure.

[0126] FIG. 20G shows a co-crystal structure of SEQ ID NO: 1 and PD-L1 in which SEQ ID NO: 1 is illustrated as a wire diagram with side chains of interest shown with thick sticks (top). PD-1 binding to PD-L1 is shown at bottom for comparison. Overlap of the SEQ ID NO: 1 and PD-1 binding interfaces on PD-L1 is consistent with the observed competition data shown in FIG. 6B, FIG. 6C, and FIG. 8.

[0127] FIG. 21 shows a binary recolor of the enrichment score map shown in FIG. 8. Amino acid substitutions relative to SEQ ID NO: 4 determined to have a neutral or beneficial effect are colored in gray. Original residues of the SEQ ID NO: 4 sequence are colored in black. Amino acids shaded in either gray or black are considered to facilitate binding to PD-L1.

[0128] FIG. 22 illustrates oligonucleotide mechanisms of action. Oligonucleotides, which are targeted to a specific sequence for its regulation, complexed with a PD-L1-binding CDP enter into cells through PD-L1-binding and natural endocytosis of PD-L1, resulting in oligonucleotide compartmentalization into endosomes. Oligonucleotides are released from the endocytic compartments into the cytoplasm where they can freely move between the nucleus and the cytoplasm. Upon entry into the nucleus, oligonucleotides can (1) modulate alternative splicing of a targeted sequence, (2) dictate the location of the polyadenylation (polyA) site of a targeted sequence, and (3) recruit RNaseH1 to induce cleavage of a targeted sequence. Oligonucleotides in the cytoplasm can be designed to (4) directly bind to microRNA (miRNA) or messenger (mRNA) sequences. siRNAs, which are targeted to a specific sequence for its regulation, may alternatively be used to (5) bind and regulate a targeted sequence in the cytosol, engaging an RNA-induced silencing complex (RISC) which is a multiprotein complex that incorporates one strand of a small interfering RNA (siRNA) or micro RNA (miRNA), using the siRNA or miRNA as a template for recognizing complementary mRNA of the targeted sequence. When it finds a complementary strand, the RISC complex cleaves the targeted sequence. An aptamer, targeted to a specific sequence for its regulation, may alternatively be used to (6) bind and regulate a target molecule. An aptamer directly binds and inhibits its intracellular or extracellular target.

[0129] FIG. 23 illustrates examples of structures of various peptide oligonucleotide complexes (e.g., a CDP-oligonucleotide complexes in which the peptide portion comprises a CDP) containing alternative and nonconventional bases, as represented in single-stranded, double-stranded, and hairpin structures. Examples of oligonucleotides include an aptamer, a gapmer, an anti-miR, an siRNA, a splice blocker ASO, and a U1 adapter. The CDP portion of the CDP-oligonucleotide complex can be used to guide the oligonucleotide sequence to a specific tissue, target, or cell, or to cause endocytosis of the oligonucleotide sequence by a cell. The legend is as follows: grey circle with black border=2′-H (DNA); white circle with black border=2′-OH (RNA); circle with horizontal stripes and black border=2′-O-ME; circle with vertical stripes=2′-O-MOE; black circle with grey border=2′-F; spotted circle with grey border=LNA; hatched circle with grey border=morpholino (unique phosphorodiamidate linkages not shown); grey angle=PO linkage; black angle=PS linkage.

[0130] FIG. 24A-FIG. 24E illustrate incorporation of the shown groups on RNA or DNA.

[0131] FIG. 24A illustrates structures of oligonucleotides containing a 5′-thiol (thiohexyl; C6) modification (left), and a 3′-thiol (C3) modification (right).

[0132] FIG. 24B illustrates an MMT-hexylaminolinker phosphoramidite.

[0133] FIG. 24C illustrates a TFA-pentylaminolinker phosphoramidite.

[0134] FIG. 24D illustrates RNA residues incorporating amine or thiol residues.

[0135] FIG. 24E illustrates oligonucleotides with aminohexyl modifications at the 5′ (left) and 3′ ends (right).

[0136] FIG. 25 illustrates generation of a cleavable disulfide linkage between a peptide (e.g., a PD-L1-binding peptide of SEQ ID NO: 1) and a cyclic dinucleotide.

[0137] FIG. 26 shows flow sorting data illustrating enrichment of peptides with pH-dependent binding to PD-L1. This data shows that pH-dependent binding peptides can be generated through flow sorting. A histidine-doped library based on a PD-L1-binding peptide (SEQ ID NO: 1), prepared as described in FIG. 19, was screened for peptides that exhibited stronger PD-L1 binding at neutral pH (7.4) and weaker binding at acidic pH (5.5). The input library was initially screened for high PD-L1 binding at pH 7.4. The second and third rounds of screening (“Sort 1” and “Sort 2,” respectively) were performed at pH 5.5 to mimic endosomal pH, enriching for poor PD-L1 binding at this pH. The final round of screening (“Sort 3”) was performed at pH 7.4. Differential binding at pH 7.4 and pH 5.5 was observed following screening (“Sort 4”). The areas encompassed by the 5-sided polygon in each graph denotes the population that was selected during sorting. Darker topographical density maps indicate staining with PD-L1 under pH 7.4 conditions and lighter topographical density maps indicate staining with PD-L1 under pH 5.5 conditions.

[0138] FIG. 27 shows binding data at pH 7.4 (left bars) and at pH 5.5 (right bars) for pH-dependent PD-L1-binding peptide variants identified in FIG. 26. Variants of SEQ ID NO: 1 with E2H, M13H, and K16H substitutions, individually and in combination, were screened for pH-dependent binding to PD-L1. Peptide variants containing substitutions at E2H (SEQ ID NO: 234), M13H (SEQ ID NO: 235), K16H (SEQ ID NO: 236), E2H and M13H (SEQ ID NO: 237), E2H and K16H (SEQ ID NO: 233), M13H and K16H (SEQ ID NO: 238), or E2H, M13H, and K16H (SEQ ID NO: 239) exhibited varying degrees of pH-dependent binding to PD-L1. “UTF” indicates untransfected cells (negative control). The parent peptide (SEQ ID NO: 187) exhibited some degree of pH-dependent binding to PD-L1. Some variants of SEQ ID NO: 187 exhibited more pH-dependence in PD-L1 binding than the parent, while some variants of SEQ ID NO: 187 exhibited less pH-dependence in PD-L1 binding than the parent. The peptide of SEQ ID NO: 234 was shown to have a high difference in binding at pH 7.4 versus pH 5.5, demonstrating higher binding at pH 7.4 than at pH 5.5. The peptide of SEQ ID NO: 233 (black arrow) is shown to have a particularly high difference in binding at pH 7.4 versus pH 5.5, also demonstrating higher binding at pH 7.4 than at pH 5.5. This data illustrates the generation of peptides that bind PD-L1 at higher levels at pH 7.4 and at lower levels at pH 5.5.

### DETAILED DESCRIPTION

[0139] Programmed death-ligand 1 (PD-L1) has proven to be a valuable therapeutic target for small molecule therapeutics and anti-PD-L1 antibodies, which function as immune checkpoint inhibitors and may be used as anti-cancer therapies. However, both small molecule therapeutics, typically less than 1000 Da in size, and antibody therapeutics, frequently larger than 140 kDa in size, have significant limitations in their efficacy and utility. Small molecule therapeutics often lack selectivity for their intended target, leading to serious off-target effects and a limited therapeutic window (i.e., the range of drug doses that may be therapeutically effective without toxicity). Additionally, the small target-binding interface may be prone to mutational selection in which a single amino acid change in the target at the binding interface may drastically alter binding of the small molecule to the target. At the opposite end of the spectrum, the large size of antibodies may prevent them from accessing central nervous system targets or penetrating throughout solid tumors. Furthermore, antibodies may require substantial engineering, such as humanization, to make them suitable for pharmaceutical use. Moreover, PD-L1 targeting offers an opportunity for cancer targeting via bispecific immune cell engagers. Bispecific immune cell engagers (BiICEs) can have moieties that bind both a cancer cell (e.g., via PD-L1) and an immune cell, thus holding an immune cell in direct proximity to the cancer cell to direct cell killing. However, the specific geometry of the immune synapse (e.g., the distance between the cancer cell and the immune cell) can be important for potent cell killing. Antibodies and antibody fragments, such as scFvs or nanobodies with molecular weights around 15-27 kDa, may not be able to create an immune synapse close enough to drive optimal cell killing.

[0140] Described herein are small, typically less than about 10 kDa in size and often less than 6 kDa in size, drug-like proteins engineered to bind to therapeutic targets, including PD-L1, and exert a therapeutic effect. These small proteins, or “miniproteins,” may themselves provide a therapeutic effect, for example by binding and inhibiting a target protein, or by delivering an additional active agent (e.g., a detectable agent, a small molecule or protein drug, an immune cell engaging moiety, or an additional active agent) to a target region. For example, due to the overexpression of PD-L1 by some cancer cells, the PD-L1-binding peptides described herein can be used to target therapeutic moieties to cancer cells and tissues, promote cell killing of cancer cells, or both. The present disclosure provides PD-L1-binding peptides, also referred to herein as miniproteins, that binding to PD-L1. These proteins may be cystine-dense peptides (CDPs), or cystine-dense miniproteins, which are stabilized by disulfide bridges formed between cysteine amino acid residues. Cystine-dense peptides may have the additional benefit of being thermostable, protease-resistant, of low immunogenicity, smaller size, and tissue penetrating. Also described herein are methods of using PD-L1-binding peptides (also referred to as PD-L1-binding CDPs) as therapeutic or diagnostic agents.

[0141] The present disclosure utilizes a peptide design approach based on the 3D protein structure to select peptides or proteins capable of binding PD-L1 and designed to bind at a specific interface of the protein (e.g., the PD-L1 protein) based on the 3D structure of the protein. For example, a peptide may be designed to bind at the PD-1-binding interface of PD-L1.

[0142] As used herein, the abbreviations for the natural L-enantiomeric amino acids are conventional and are as follows: alanine (A, Ala); arginine (R, Arg); asparagine (N, Asn); aspartic acid (D, Asp); cysteine (C, Cys); glutamic acid (E, Glu); glutamine (Q, Gln); glycine (G, Gly); histidine (H, His); isoleucine (I, Ile); leucine (L, Leu); lysine (K, Lys); methionine (M, Met); phenylalanine (F, Phe); proline (P, Pro); serine (S, Ser); threonine (T, Thr); tryptophan (W, Trp); tyrosine (Y, Tyr); valine (V, Val). Typically, Xaa can indicate any amino acid. In some embodiments, X can be asparagine (N), glutamine (Q), histidine (H), lysine (K), or arginine (R).

[0143] Some embodiments of the disclosure contemplate D-amino acid residues of any standard or non-standard amino acid or analogue thereof. When an amino acid sequence is represented as a series of three-letter or one-letter amino acid abbreviations, the left-hand direction is the amino terminal direction and the right-hand direction is the carboxy terminal direction, in accordance with standard usage and convention.

[0144] The terms “peptide,” “polypeptide,” “miniprotein,” “protein,” “hitchin,” “cystine-dense peptide,” “knotted peptides,” or “CDP” can be used interchangeably herein to refer to a polymer of amino acid residues. In various embodiments, “peptides,” “polypeptides,” and “proteins” can be chains of amino acids whose alpha carbons are linked through peptide bonds. The terminal amino acid at one end of the chain (e.g., amino terminal, or N-terminal) therefore can have a free amino group, while the terminal amino acid at the other end of the chain (e.g., carboxy terminal, or C-terminal) can have a free carboxyl group. As used herein, the term “amino terminus” (e.g., abbreviated N-terminus) can refer to the free α-amino group on an amino acid at the amino terminal of a peptide or to the α-amino group (e.g., imino group when participating in a peptide bond) of an amino acid at any other location within the peptide. Similarly, the term “carboxy terminus” can refer to the free carboxyl group on the carboxy terminus of a peptide or the carboxyl group of an amino acid at any other location within the peptide. Peptides also include essentially any polyamino acid including, but not limited to, peptide mimetics such as amino acids joined by an ether or thioether as opposed to an amide bond.

[0145] As used herein, the term “peptide construct” or “peptide complex” can refer to a molecule comprising one or more peptides of the present disclosure that can be conjugated to, linked to, or fused to one or more peptides or cargo molecules. In some cases, cargo molecules are active agents. The term “active agent” can refer to any molecule, e.g., any molecule that is capable of eliciting a biological effect and/or a physical effect (e.g., emission of radiation) which can allow the localization, detection, or visualization of the respective peptide construct. In various embodiments, the term “active agent” refers to a therapeutic and/or diagnostic agent. A peptide construct of the present disclosure can comprise a PD-L1-binding peptide that is linked to one or more active agents via one or more linker moieties (e.g., cleavable or stable linker) as described herein. As used herein, the term “peptide complex” can also refer to one or more peptides of the present disclosure that are fused, linked, conjugated, or otherwise connected to form a complex. In some cases, the one or more peptides can comprise a PD-L1-binding peptide, an additional peptide active agent, a peptide that binds immune cells (e.g., T cells), a half-life modifying peptide, a peptide that modifies pharmacodynamics and/or pharmacokinetic properties, or combinations thereof.

[0146] The terms “nucleotide,” “oligonucleotide,” “polynucleotide,” “polynucleic acid,” or “nucleic acid” may refer to any molecule comprising nucleic acids, such as short single- or double-stranded DNA or RNA molecules. A nucleotide may comprise deoxyribonucleotides, ribonucleotides, modified deoxyribonucleotides or ribonucleotides, derivatives of deoxyribonucleotides or ribonucleotides, synthetic nucleotides, other nucleotides comprising various nucleobases or various sugars, or combinations thereof. As used herein, “nucleotide,” “oligonucleotide,” “polynucleotide,” “polynucleic acid,” or “nucleic acid” include any single stranded (ssDNA, ssRNA) or double stranded (dsDNA, dsRNA) or a combination of single and double stranded (for example with a mismatched sequence, hairpin or other structure), an antisense RNA, complementary RNA, inhibitory RNA, interfering RNA, nuclear RNA, antisense oligonucleotide (ASO), microRNA (miRNA), oligonucleotide complementary to natural antisense transcripts (NATs) sequences, siRNA, snRNA, aptamer, gapmer, anti-miR, splice blocker ASO, or U1 Adapter. Within the peptide oligonucleotide complexes described herein, “nucleotide,” “oligonucleotide,” “polynucleotide,” “polynucleic acid,” or “nucleic acid” may be intended for modulating gene or protein expression, or for modulating intermolecular pr intramolecular interactions, and may each be considered a target-binding agent capable of binding a target molecule. The target may be a protein, nucleic acid, or other non-nucleic acid molecule. When the target is a nucleic acid, the sequence of a target molecule may be derived from an RNA (e.g., an mRNA or a pre-mRNA) or an open reading frame (ORF) of a gene or protein coding sequence. The sequence of a target molecule may be found in or derived from the coding region or the non-coding region of a gene, or it may be found in or derived from the mature mRNA (e.g., an mRNA which has been spliced, polyadenylated, capped, and exported to the cytosol for translation) or the immature pre-mRNA. The target binding agent may be the complement to such target molecule sequence (e.g., an open reading frame, non-coding sequence, or RNA).

[0147] As used herein, the term “complement” or “reverse complement” may refer to a nucleotide sequence that is fully or partially reverse complementary to a target or reference sequence. The term “complementary” may be used interchangeably with “reverse complementary” or “antisense” to describe nucleotide sequences that form base-pairing interactions (e.g., A/T, A/U, or C/G interactions) with a target or reference nucleotide sequence.

[0148] As used herein, the term “antisense oligonucleotide” includes small, noncoding, and diffusible molecules, containing about 15-35 nucleotides that form a reverse complement of a nucleic acid target sequence (e.g., a transcript or an mRNA molecule). In some embodiments, the antisense molecule may be fully reverse complementary to the target sequence. In some embodiments, the antisense molecule may comprise one or more base mismatches relative to the target sequence. As used herein, “antisense” may refer to nucleotides of varying chemistries, whether natural (RNA and/or DNA) or synthetic (e.g. 2′ pentose sugar modifications, 2′F, 2′OMe, LNA, PNA, and/or morpholino) with natural or synthetic linkages (e.g. phosphodiester, phosphorothioate, phosphorodiamidate, or thiophosphorodiamidate), as the context requires, and can comprise oligonucleotides, ribonucleotides, ribonucleosides, deoxyribonucleotides, deoxyribonucleosides, may be single stranded or double stranded in whole or in part or in any combination, and any of the forgoing in a modified form and in any combination to form a polynucleic acid. Similarly, thiophosphorodiamidate linkages may be used. Such polynucleic acid can further contain modified bases (e.g. synthetic purines or pyrimidines whose chemistries differ from that of adenine, cytosine, guanine, thymine, or uracil) or contain other atypical elements or chemistries. In various embodiments, antisense RNA containing 19-23 nucleotides (nt), or 15-35 nt, that complement target RNA. Antisense RNAs are about 5 to 30 nt in length, 10 to 25 nt in length, 15 to 25 nt in length, 19 to 23 nt in length, or at least 10 nt in length, at least 15 nt in length, at least 20 nt in length, at least 25 nt in length, or at least 30 nt in length, at least 50 nt in length, at least 100 nucleotides in length. Non-limiting examples of antisense oligonucleotides (ASOs) include aptamers, gapmers, anti-miRs, siRNAs, miRNAs, snRNAs, splice blocker ASOs, and U1 adapters.

[0149] As used herein, the term “interfering RNA” or “inhibitory RNA” is used interchangeably and includes RNA molecules that are involved in sequence-specific suppression of gene expression by forming a double-stranded RNA. As used herein, “interfering RNA” or “inhibitory RNA” can comprise ribonucleotides, ribonucleosides, deoxyribonucleotides, deoxyribonucleosides, may be single stranded or double stranded in whole or in part or in any combination, and any of the forgoing in a modified form and in any combination to form a polynucleic acid. Such polynucleic acid can further contain modified bases or contain other atypical elements or chemistries. Common forms of “interfering RNA” or “inhibitory RNA” include small inhibitory RNA (siRNA or RNAi), and dsRNA, ssRNA, hairpin RNA and other known structures. In various embodiments, inhibitory RNAs are about 5 to 30 nt in length, 10 to 25 nt in length, 15 to 25 nt in length, 19 to 23 nt in length, or at least 10 nt in length, at least 15 nt in length, at least 20 nt in length, at least 25 nt in length, or at least 30 nt in length, at least 50 nt in length, at least 100 nucleotides in length.

[0150] As used herein, the term “nuclear RNA” includes any RNA molecules that are present in the nucleus of a cell. As used herein, “nuclear RNA” can comprise small nuclear RNA (snRNA), spliceosomal RNA, and other known structures.

[0151] As used herein, the term “U1 adaptor” includes bifunctional oligonucleotides with a target domain complementary to a site in the vicinity of the target gene's polyadenylation (polyA) site and a U1 domain that binds to the U1 small nuclear RNA component of the U1 small nuclear ribonucleoprotein (U1 snRNP). U1 Adaptors can be used as synthetic oligonucleotides to recruit endogenous U1 snRNP to a target sequence or site. As used herein, U1 adapters can comprise any nucleotide sequence complementary to the ssRNA component of the U1 small nuclear ribonucleoprotein (U1 snRNP). In various embodiments, U1 adapters are about 5 to 30 nt in length, 10 to 25 nt in length, 15 to 25 nt in length, 19 to 23 nt in length, or at least 10 nt in length, at least 15 nt in length, at least 20 nt in length, at least 25 nt in length, or at least 30 nt in length, at least 50 nt in length, at least 100 nucleotides in length. nucleotides in length and complementary to any sequence along the U1 domain or U1 small nuclear ribonucleoprotein (U1 snRNP) splicing factor.

[0152] As used herein, the terms “comprising” and “having” can be used interchangeably. For example, the terms “a peptide comprising an amino acid sequence of SEQ ID NO: 1” and “a peptide having an amino acid sequence of SEQ ID NO: 1” can be used interchangeably.

[0153] As used herein, and unless otherwise stated, the term “PD-L1” or “programmed death-ligand 1” is a class of protein used herein and can refer to a PD-L1 from any species (e.g., human or murine PD-L1 or any human or non-human animal PD-L1). In some cases, and as used herein, the term “PD-L1” or “programmed death-ligand 1” refers to human PD-L1 and can include PD-L1 or any combination or fragment (e.g., ectodomain) thereof. In some cases, PD-L1 may also be referred to as “CD274,” “B7-H,” “B7H1,” “PDCD1L1,” “PDCD1LG1”, or “PDL1.”

[0154] The term “engineered,” when applied to a polynucleotide, denotes that the polynucleotide has been removed from its natural genetic milieu and is thus free of other extraneous or unwanted coding sequences, and is in a form suitable for use within genetically engineered protein production systems. Such engineered molecules are those that are separated from their natural environment and include cDNA and genomic clones (i.e., a prokaryotic or eukaryotic cell with a vector containing a fragment of DNA from a different organism). Engineered DNA molecules of the present invention are free of other genes with which they are ordinarily associated but can include naturally occurring or non-naturally occurring 5′ and 3′ untranslated regions such as enhancers, promoters, and terminators.

[0155] An “engineered” polypeptide or protein is a polypeptide or protein that is found in a condition other than its native environment, such as apart from blood and animal tissue. In a preferred form, the engineered polypeptide is substantially free of other polypeptides, particularly other polypeptides of animal origin. It is preferred to provide the polypeptides in a highly purified form, e.g., greater than 90% pure, greater than 95% pure, more preferably greater than 98% pure or greater than 99% pure. When used in this context, the term “engineered” does not exclude the presence of the same polypeptide in alternative physical forms, such as dimers, heterodimers and multimers, heteromultimers, or alternatively glycosylated, carboxylated, modified, or derivatized forms.

[0156] An “engineered” peptide or protein is a polypeptide that is distinct from a naturally occurring polypeptide structure, sequence, or composition. Engineered peptides include non-naturally occurring, artificial, isolated, synthetic, designed, modified, or recombinantly expressed peptides. Provided herein are engineered PD-L1-binding peptides, variants, or fragments thereof. These engineered PD-L1-binding peptides can be further linked to an active agent or a half-life extending moiety or can be further linked to an active agent or detectable agent, or any combination of the foregoing.

[0157] Polypeptides of the disclosure include polypeptides that have been modified in any way, for example, to: (1) reduce susceptibility to proteolysis, (2) reduce susceptibility to reduction, (3) alter binding affinity for forming protein complexes, (4) alter binding affinities, (5) alter binding affinity at certain pH values, and (6) confer or modify other physicochemical or functional properties. For example, single or multiple amino acid substitutions (e.g., conservative amino acid substitutions) are made in the naturally occurring sequence (e.g., in the portion of the polypeptide outside the domain(s) forming intermolecular contacts). A “conservative amino acid substitution” can refer to the substitution in a polypeptide of an amino acid with a functionally similar amino acid. The following six groups each contain amino acids that can be conservative substitutions for one another: i) Alanine (A), Serine (S), and Threonine (T); ii) Aspartic acid (D) and Glutamic acid (E); iii) Asparagine (N) and Glutamine (Q); iv) Arginine (R) and Lysine (K); v) Isoleucine (I), Leucine (L), Methionine (M), and Valine (V); vi) Phenylalanine (F), Tyrosine (Y), and Tryptophan (W). In some embodiments, a conserved amino acid substitution can comprise a non-natural amino acid. For example, substitution of an amino acid for a non-natural derivative of the same amino acid can be a conserved substitution.

[0158] The terms “polypeptide fragment” and “truncated polypeptide” as used herein can refer to a polypeptide that has an amino-terminal and/or carboxy-terminal deletion as compared to a corresponding full-length peptide or protein. In various embodiments, fragments are at least 5, at least 10, at least 15, at least 20, at least 25, at least 30, at least 35, at least 40, at least 45, at least 50, at least 100, at least 150, at least 200, at least 250, at least 300, at least 350, at least 400, at least 450, at least 500, at least 600, at least 700, at least 800, at least 900 or at least 1000 amino acids in length. In various embodiments, fragments can also be, e.g., at most 1000, at most 900, at most 800, at most 700, at most 600, at most 500, at most 450, at most 400, at most 350, at most 300, at most 250, at most 200, at most 150, at most 100, at most 50, at most 45, at most 40, at most 35, at most 30, at most 25, at most 20, at most 15, at most 10, or at most 5 amino acids in length. A fragment can further comprise, at either or both of its ends, one or more additional amino acids, for example, a sequence of amino acids from a different naturally-occurring protein (e.g., an Fc or leucine zipper domain) or an artificial amino acid sequence (e.g., an artificial linker sequence).

[0159] As used herein, the terms “peptide” or “polypeptide” in conjunction with “variant” “mutant” or “enriched mutant” or “permuted enriched mutant” can refer to a peptide or polypeptide that can comprise an amino acid sequence wherein one or more amino acid residues are inserted into, deleted from and/or substituted into the amino acid sequence relative to another polypeptide sequence. In various embodiments, the number of amino acid residues to be inserted, deleted, or substituted is at least 1, at least 2, at least 3, at least 4, at least 5, at least 10, at least 25, at least 50, at least 75, at least 100, at least 125, at least 150, at least 175, at least 200, at least 225, at least 250, at least 275, at least 300, at least 350, at least 400, at least 450 or at least 500 amino acids in length. Variants of the present disclosure include peptide conjugates or fusion molecules (e.g., peptide constructs or peptide complexes).

[0160] A “derivative” of a peptide or polypeptide can be a peptide or polypeptide that can have been chemically modified, e.g., conjugation to another chemical moiety such as, for example, polyethylene glycol, albumin (e.g., human serum albumin), phosphorylation, and glycosylation.

[0161] The term “% sequence identity” can be used interchangeably herein with the term “% identity” and can refer to the level of amino acid sequence identity between two or more peptide sequences or the level of nucleotide sequence identity between two or more nucleotide sequences, when aligned using a sequence alignment program. For example, as used herein, 80% identity means the same thing as 80% sequence identity determined by a defined algorithm and means that a given sequence is at least 80% identical to another length of another sequence. In various embodiments, the % identity is selected from, e.g., at least 60%, at least 65%, at least 70%, at least 75%, at least 80%, at least 85%, at least 90%, at least 91%, at least 92%, at least 93%, at least 94%, at least 95%, at least 96%, at least 97%, at least 98%, at least 99%, or at least 99% or more up to 100% sequence identity to a given sequence. In various embodiments, the % identity is in the range of, e.g., about 60% to about 70%, about 70% to about 80%, about 80% to about 85%, about 85% to about 90%, about 90% to about 95%, or about 95% to about 99%.

[0162] The terms “% sequence homology” or “percent sequence homology” or “percent sequence identity” can be used interchangeably herein with the terms “% homology,” “% sequence identity,” or “% identity” and can refer to the level of amino acid sequence homology between two or more peptide sequences or the level of nucleotide sequence homology between two or more nucleotide sequences, when aligned using a sequence alignment program. For example, as used herein, 80% homology means the same thing as 80% sequence homology determined by a defined algorithm, and accordingly a homologue of a given sequence has greater than 80% sequence homology over a length of the given sequence. In various embodiments, the % homology is selected from, e.g., at least 60%, at least 65%, at least 70%, at least 75%, at least 80%, at least 85%, at least 90%, at least 91%, at least 92%, at least 93%, at least 94%, at least 95%, at least 96%, at least 97%, at least 98%, or at least 99% or more up to 100% sequence homology to a given sequence. In various embodiments, the % homology is in the range of, e.g., about 60% to about 70%, about 70% to about 80%, about 80% to about 85%, about 85% to about 90%, about 90% to about 95%, or about 95% to about 99%.

[0163] A protein or polypeptide can be “substantially pure,” “substantially homogeneous”, or “substantially purified” when at least about 60% to 75% of a sample exhibits a single species of polypeptide. The polypeptide or protein can be monomeric or multimeric. A substantially pure polypeptide or protein can typically comprise about 50%, 60%, 70%, 80% or 90% W/W of a protein sample, more usually about 95%, and e.g., will be over 98% or 99% pure. Protein purity or homogeneity can be indicated by a number of means well known in the art, such as polyacrylamide gel electrophoresis of a protein sample, followed by visualizing a single polypeptide band upon staining the gel with a stain well known in the art. For certain purposes, higher resolution is provided by using high-pressure liquid chromatography (e.g., HPLC) or other high-resolution analytical techniques (e.g., LC-mass spectrometry).

[0164] As used herein, the term “pharmaceutical composition” can generally refer to a composition suitable for pharmaceutical use in a subject such as an animal (e.g., human or mouse). A pharmaceutical composition can comprise a pharmacologically effective amount of an active agent and a pharmaceutically acceptable carrier. The term “pharmacologically effective amount” can refer to that amount of an agent effective to produce the intended biological or pharmacological result.

[0165] As used herein, the term “pharmaceutically acceptable carrier” can refer to any of the standard pharmaceutical carriers, vehicles, buffers, and excipients, such as a phosphate buffered saline solution, or a buffered saline solution, 5% aqueous solution of dextrose, and emulsions, such as an oil/water or water/oil emulsion, and various types of wetting agents and/or adjuvants. Suitable pharmaceutical carriers and formulations are described in Remington's Pharmaceutical Sciences, 21st Ed. 2005, Mack Publishing Co, Easton. A “pharmaceutically acceptable salt” can be a salt that can be formulated into a compound for pharmaceutical use including, e.g., metal salts (sodium, potassium, magnesium, calcium, etc.) and salts of ammonia or organic amines.

[0166] As used herein, the terms “treat”, “treating” and “treatment” can refer to a method of alleviating or abrogating a biological disorder and/or at least one of its attendant symptoms. As used herein, to “alleviate” a disease, disorder, or condition, for example, means reducing the severity and/or occurrence frequency of the symptoms of the disease, disorder, or condition. Further, references herein to “treatment” can include references to curative, palliative, and prophylactic or diagnostic treatment.

[0167] Generally, a cell of the present disclosure can be a eukaryotic cell or a prokaryotic cell. A cell can be an epithelial cell, a cancer cell, or a cell of the immune system. A cell can be a microorganism, bacterial, yeast, fungal or algae cell. A cell can be an animal cell or a plant cell. An animal cell can include a cell from a marine invertebrate, fish, insects, amphibian, reptile, or mammal. A mammalian cell can be obtained from a primate, ape, equine, bovine, porcine, canine, feline, or rodent. A mammal can be a primate, ape, dog, cat, rabbit, ferret, or the like. A rodent can be a mouse, rat, hamster, gerbil, hamster, chinchilla, or guinea pig. A bird cell can be from a canary, parakeet, or parrots. A reptile cell can be from a turtles, lizard, or snake. A fish cell can be from a tropical fish. For example, the fish cell can be from a zebrafish (e.g., Danino rerio). A worm cell can be from a nematode (e.g., C. elegans). An amphibian cell can be from a frog. An arthropod cell can be from a tarantula or hermit crab.

[0168] A mammalian cell can also include cells obtained from a primate (e.g., a human or a non-human primate). A mammalian cell can include a blood cell, a stem cell, an epithelial cell, connective tissue cell, hormone secreting cell, a nerve cell, a skeletal muscle cell, or an immune system cell.

[0169] As used herein, the term “vector,” generally refers to a DNA molecule capable of replication in a host cell and/or to which another DNA segment can be operatively linked so as to bring about replication of the attached segment. A plasmid is an exemplary vector.

[0170] As used herein, the term “subject,” generally refers to a human or to another animal. A subject can be of any age, for example, a subject can be an infant, a toddler, a child, a pre-adolescent, an adolescent, an adult, or an elderly individual.

[0171] Ranges can be expressed herein as from “about” one particular value, and/or to “about” another particular value. When such a range is expressed, another embodiment includes from the one particular value and/or to the other particular value. Similarly, when values are expressed as approximations, by use of the antecedent “about,” it will be understood that the particular value forms another embodiment. It will be further understood that the endpoints of each of the ranges are in relation to the other endpoint, and independently of the other endpoint. The term “about” as used herein refers to a range that is 15% plus or minus from a stated numerical value within the context of the particular usage. For example, about 10 can include a range from 8.5 to 11.5.

### Peptides

[0172] The PD-L1-binding peptides described herein may comprise PD-L1-binding cystine-dense peptides (CDPs). A PD-L1-binding peptide may be engineered to bind to PD-L1 (e.g., human PD-L1). In some cases, a PD-L1-binding peptide may be engineered to bind at a specific interface of PD-L1 (e.g., at the PD-1 binding interface). The PD-L1-binding peptides and PD-L1-binding peptide complexes of the present disclosure can comprise one or more peptides. For example, a PD-L1-binding peptide complex may comprise a PD-L1-binding peptide and an additional peptide therapeutic agent. A PD-L1-binding peptide of the present disclosure may be engineered to retain binding to PD-L1 when complexed with an additional active agent. In some instances, an PD-L1-binding peptide may be engineered to contain one or more amino acid residues capable of modification (e.g., with a linker).

[0173] In some instances, a peptide as disclosed herein can contain only one lysine residue, or no lysine residues. In some instances, one or more or all of the lysine residues in the peptide are replaced with arginine residues. In some instances, one or more or all of the methionine residues in the peptide are replaced by leucine or isoleucine. One or more or all of the tryptophan residues in the peptide can be replaced by phenylalanine or tyrosine. In some instances, one or more or all of the asparagine residues in the peptide are replaced by glutamine. In some embodiments, one or more or all of the aspartic acid residues can be replaced by glutamic acid residues. In some instances, one or more or all of the lysine residues in the peptide are replaced by alanine or arginine. In some embodiments, the N-terminus of the peptide is blocked or protected, such as by an acetyl group or a tert-butyloxycarbonyl group. Alternatively or in combination, the C-terminus of the peptide can be blocked or protected, such as by an amide group or by the formation of an ester (e.g., a butyl or a benzyl ester). In some embodiments, the peptide is modified by methylation on free amines. For example, full methylation is accomplished through the use of reductive methylation with formaldehyde and sodium cyanoborohydride.

[0174] In some embodiments, an N-terminal dipeptide can be absent as shown in SEQ ID NO: 1-SEQ ID NO: 59, SEQ ID NO: 435, or SEQ ID NO: 554-SEQ ID NO: 560, or the dipeptide GS can be added as the first two N-terminal amino acids, as shown in SEQ ID NO: 60-SEQ ID NO: 118, SEQ ID NO: 436, or SEQ ID NO: 561-SEQ ID NO: 567, or can be substituted by any other one or two amino acids. In some embodiments, the dipeptide GS is used as a linker or used to couple to a linker to form a peptide conjugate or fusion molecules such as a peptide construct or peptide complex. In some embodiments, the linker comprises a GₓS_{y} (SEQ ID NO: 155) peptide, wherein x and y independently are any whole number, such as 1, 2, 3, 4, 5, 6, 7, 8, 9, 10, 12, 16, or 20 and the G and S residues are arranged in any order. In some embodiments, the peptide linker comprises (GS)x (SEQ ID NO: 156), wherein x can be any whole number, such as 1, 2, 3, 4, 5, 6, 7, 8, 9, and 10. In some embodiments, the peptide linker comprises GGSSG (SEQ ID NO: 157), GGGGG (SEQ ID NO: 158), GSGSGSGS (SEQ ID NO: 159), GSGG (SEQ ID NO: 160), GGGGS (SEQ ID NO: 161), GGGS (SEQ ID NO: 154), GGS (SEQ ID NO: 162), GGGSGGGSGGGS (SEQ ID NO: 163), or a variant or fragment thereof or any number of repeats and combinations thereof. Additionally, KKYKPYVPVTTN (SEQ ID NO: 166) from DkTx, and EPKSSDKTHT (SEQ ID NO: 167) from human IgG₃ can be used as a peptide linker or any number of repeats and combinations thereof. In some embodiments, the peptide linker comprises GGGSGGSGGGS (SEQ ID NO: 164) or a variant or fragment thereof or any number of repeats and combinations thereof. In some embodiments, a peptide linker comprises any of SEQ ID NO: 154-SEQ ID NO: 241 or SEQ ID NO: 433. Additional linkers that may be linked, fused, or conjugated to a PD-L1-binding peptide of the present disclosure are provided in TABLE 9. It is understood that any of the foregoing linkers or a variant or fragment thereof can be used with any number of repeats or any combinations thereof. It is also understood that other peptide linkers in the art or a variant or fragment thereof can be used with any number of repeats or any combinations thereof. The length of the linker can be tailored to maximize binding of the PD-L1-binding peptide complex to both PD-L1 and an additional target (e.g., a target on an immune cell) at the same time including accounting for steric access. In some embodiments, the linker between the PD-L1-binding and immune cell-binding peptides is at least 5, at least 6, at least 7, at least 8, at least 9, at least 10, at least 11, at least 12, at least 13, at least 14, at least 15, at least 16, at least 17, at least 18, at least 19, at least 20, at least 21, at least 22, at least 23, at least 24, at least 25, at least 26, at least 27, at least 28, at least 29, at least 30, at least 31, at least 32, at least 33, at least 34, at least 35, at least 36 at least 37, at least 38, at least 39, at least 40, at least 41, at least 42, at least 43, at least 44, at least 45, at least 46, at least 47, at least 48, at least 49, at least 50, at least 51, at least 52, at least 53, at least 54, at least 55, at least 56, at least 57, at least 58, at least 59, at least 60, at least 61, at least 62, at least 63, at least 64, at least 65 residues incrementally up to 100 residues long.

[0175] In some embodiments of the present disclosure, a peptide or peptide complex as described herein comprises an amino acid sequence set forth in any one of SEQ ID NO: 1-SEQ ID NO: 118, SEQ ID NO: 435, SEQ ID NO: 436, or SEQ ID NO: 554-SEQ ID NO: 567. A peptide as disclosed herein can be a fragment comprising a contiguous fragment of any one of SEQ ID NO: 1-SEQ ID NO: 118, SEQ ID NO: 435, SEQ ID NO: 436, or SEQ ID NO: 554-SEQ ID NO: 567 that is at least 7, at least 8, at least 9, at least 10, at least 11, at least 12, at least 13, at least 14, at least 15, at least 16, at least 17, at least 18, at least 19, at least 20, at least 21, at least 22, at least 23, at least 24, at least 25, at least 26, at least 27, at least 28, at least 29, at least 30, at least 31, at least 32, at least 33, at least 34, at least 35, at least 36 at least 37, at least 38, at least 39, at least 40, at least 41, at least 42, at least 43, at least 44, at least 45, at least 46, at least 47, at least 48, at least 49, at least 50, at least 51, at least 52, at least 53, at least 54, at least 55, at least 56, at least 57, at least 58, at least 59, at least 60, at least 61, at least 62, at least 63, at least 64, at least 65 residues long, wherein the peptide fragment is selected from any portion of the peptide. In some embodiments, the peptide sequence is flanked by additional amino acids. One or more additional amino acids, for example, confer a particular in vivo charge, isoelectric point, chemical conjugation site, stability, or physiologic property to a peptide.

[0176] In some instances, the CDPs described herein that are capable of targeting and binding to a PD-L1 comprise no more than 80 amino acids in length, or no more than 70, no more than 65, no more than 60, no more than 55, no more than 50, no more than 49, no more than 45, no more than 40, no more than 35, no more than 30, no more than 25, no more than 20, no more than 15, or no more than 10 amino acids in length. In some instances, a PD-L1-binding moiety (e.g., an scFv) described herein that is capable of targeting and binding to a PD-L1 comprises a length of from about 100 to about 400, from about 200 to about 300, or from about 240 to about 250 amino acids in length.

[0177] In other embodiments, peptides can be conjugated to, linked to, or fused to a carrier or a molecule with targeting or homing function for a cell of interest or a target cell (e.g., an immune cell). In other embodiments, peptides can be conjugated to, linked to, or fused to a molecule that extends half-life or modifies the pharmacodynamic and/or pharmacokinetic properties of the peptides, or any combination thereof, such as an Fc region or polyethylene glycol.

[0178] In some instances, a peptide comprises at least 1, at least 2, at least 3, at least 4, at least 5, at least 6, at least 7, at least 8, at least 9, at least 10, at least 11, at least 12, at least 13, at least 14, at least 15, at least 16, at least 17, at least 18, at least 19, or at least 20 positively charged residues, such as Arg or Lys, or any combination thereof. In some instances, one or more lysine residues in the peptide are replaced with arginine residues. In some embodiments, peptides comprise one or more Arg patches. In some embodiments, 1 or more, 2 or more, 3 or more, 4 or more, 5 or more, 6 or more, 7 or more, 8 or more, 9 or more, or 10 or more Arg or Lys residues are solvent exposed on a peptide. In some instances, a peptide comprises at least 1, at least 2, at least 3, at least 4, at least 5, at least 6, at least 7, at least 8, at least 9, at least 10, at least 11, at least 12, at least 13, at least 14, at least 15, at least 16, at least 17, at least 18, at least 19, or at least 20 histidine residues.

[0179] The peptides of the present disclosure can further comprise neutral amino acid residues. In some embodiments, the peptide has 35 or fewer neutral amino acid residues. In other embodiments, the peptide has 81 or fewer neutral amino acid residues, 70 or fewer neutral amino acid residues, 60 or fewer neutral amino acid residues, 50 or fewer neutral amino acid residues, 40 or fewer neutral amino acid residues, 36 or fewer neutral amino acid residues, 33 or fewer neutral amino acid residues, 30 or fewer neutral amino acid residues, 25 or fewer neutral amino acid residues, or 10 or fewer neutral amino acid residues.

[0180] The peptides of the present disclosure can further comprise negative amino acid residues. In some embodiments the peptide has 10 or fewer, 9 or fewer, 8 or fewer, 7 or fewer, 6 or fewer negative amino acid residues, 5 or fewer negative amino acid residues, 4 or fewer negative amino acid residues, 3 or fewer negative amino acid residues, 2 or fewer negative amino acid residues, or 1 or fewer negative amino acid residues. While negative amino acid residues can be selected from any negatively charged amino acid residues, in some embodiments, the negative amino acid residues are either E, or D, or a combination of both E and D.

[0181] In some embodiments of the present disclosure, a three-dimensional or tertiary structure of a peptide is primarily comprised of beta-sheets and/or alpha-helix structures. In some embodiments, designed or engineered PD-L1-binding peptides or peptide complexes of the present disclosure are small, compact peptides or polypeptides stabilized by intra-chain disulfide bonds (e.g., mediated by cysteines) to form cystine bonds. In some embodiments, engineered PD-L1-binding peptides have structures comprising helix-turn-helix motifs with at least one disulfide bridge between each of the alpha helices, thereby stabilizing the peptides. In some embodiments, the engineered PD-L1-binding peptides or peptide complexes comprise structures with an alpha helix, one or more beta sheets, one or more alpha helices or one or more intra-chain disulfide bonds. In some embodiments, the engineered PD-L1-binding peptides or peptide complexes contain no hydrophobic core.

### Cystine-Dense Peptides

[0182] In some embodiments, PD-L1-binding peptides or peptide complexes of the present disclosure comprise one or more cysteine (Cys) amino acid residues, or one or more disulfide bonds. In some embodiments, the PD-L1-binding peptides or peptide complexes are derived from cystine-dense peptides (CDPs), knotted peptides, or hitchins. In some embodiments, CDPs contain at least 3 intramolecular cystine bonds. As used herein, the term “peptide” is considered to be interchangeable with the terms “knotted peptide,” “cystine-dense peptide,” “CDP,” “knottin,” and “hitchin,” (See, for example, Correnti et al. Screening, large-scale production, and structure-based classification for cystine-dense peptides. Nat Struct Mol Biol. 2018 March; 25(3): 270-278).

[0183] The PD-L1-binding peptides of the present disclosure, or derivatives, fragments, or variants thereof, can be have an affinity and selectively for PD-L1, or a derivative or analog thereof. In some cases, the PD-L1-binding peptides of the present disclosure can be engineered using site-saturation mutagenesis (SSM) to exhibit improved PD-L1-binding properties or to alter the properties of the binding interface with PD-L1. In some cases, the peptides of the present disclosure are cystine-dense peptides (CDPs), related to knotted peptides or hitchin-derived peptides or knottin-derived peptides. The PD-L1-binding peptides can be cystine-dense peptides (CDPs). The PD-L1-binding CDPs can have a “pontoon” structure featuring a pair of alpha-helices separated by an unstructured loop and stabilized with disulfide bonds resembling the underside of a pontoon boat, with an example disulfide connectivity being 1-6, 2-5, 3-4 for a three-disulfide pontoon scaffold. The PD-L1-binding CDPs can also have a hitchin-like structure. Hitchins can be a subclass of CDPs wherein six cysteine residues form disulfide bonds according to the connectivity [1-4], 2-5, 3-6 indicating that the first cysteine residue forms a disulfide bond with the fourth residue, the second with the fifth, and the third cysteine residue with the sixth. The brackets in this nomenclature indicate cysteine residues form the knotting disulfide bond. (See e.g., Correnti et al. Screening, large-scale production, and structure-based classification for cystine-dense peptides. Nat Struct Mol Biol. 2018 March; 25(3): 270-278). Knottins can be a subclass of CDPs wherein six cysteine residues form disulfide bonds according to the connectivity 1-4, 2-5, [3-6]. Knottins are a class of peptides, usually ranging from about 20 to about 80 amino acids in length that are often folded into a compact structure. Knottins are typically assembled into a complex tertiary structure that is characterized by a number of intramolecular disulfide crosslinks and can contain beta strands and other secondary structures. The presence of the disulfide bonds gives CDPs, including knottins, pontoons, and hitchins, remarkable environmental stability, allowing them to withstand extremes of temperature and pH and to resist the proteolytic enzymes and reducing molecules of the blood stream. In some cases, the peptides described herein can be derived from knotted peptides. The amino acid sequences of peptides as disclosed herein can comprise a plurality of cysteine residues. In some cases, at least cysteine residues of the plurality of cysteine residues present within the amino acid sequence of a peptide participate in the formation of disulfide bonds. In some cases, all cysteine residues of the plurality of cysteine residues present within the amino acid sequence of a peptide participate in the formation of disulfide bonds. As described herein, the term “knotted peptide” can be used interchangeably with the terms “cystine-dense peptide”, “CDP”, or “peptide”.

[0184] Provide herein are methods of identification, maturation, characterization, and utilization of CDPs that bind PD-L1 and allow selection, optimization and characterization of PD-L1-binding CDPs that can be used alone or in peptide complexes, including for use as bioactive molecules at therapeutically relevant concentrations in a subject (e.g., a human or non-human animal). This disclosure demonstrates the utility of CDPs as a diverse scaffold family that can be screened for applicability to modern drug discovery strategies. CDPs comprise alternatives to existing biologics, primarily antibodies, which can bypass some of the liabilities of the immunoglobulin scaffold, including poor tissue permeability, immunogenicity, larger size, and long serum half-life that can become problematic if toxicities arise. Peptides of the present disclosure in the 20-80 amino acid range represent medically relevant therapeutics that are mid-sized, with many of the favorable binding specificity and affinity characteristics of antibodies but with improved stability, reduced immunogenicity, and simpler manufacturing methods. The intramolecular disulfide architecture of CDPs provides particularly high stability metrics, reducing fragmentation and immunogenicity, while their smaller size could improve tissue penetration or cell penetration and facilitate tunable serum half-life. Disclosed herein are peptides representing candidate peptides that can bind and inhibit PD-L1 or serve as vehicles for active agent delivery to PD-L1 positive cells.

[0185] In some embodiments, PD-L1-binding peptides can be engineered peptides. An engineered peptide can be a peptide that is non-naturally occurring, artificial, isolated, synthetic, designed, or recombinantly expressed. In some embodiments, the PD-L1-binding peptides of the present disclosure comprise one or more properties of CDPs, knotted peptides, or hitchins, such as stability, resistance to proteolysis, resistance to reducing conditions, and/or ability to cross the blood brain barrier.

[0186] CDPs can be advantageous for intra-tumoral delivery, intracellular delivery, or delivery to the CNS, as compared to other molecules such as antibodies due to smaller size, greater tissue or cell penetration, lack of Fc function, and quicker clearance from serum, and as compared to smaller peptides due to resistance to proteases (both for stability and for immunogenicity reduction). In some embodiments, the PD-L1-binding peptides of the present disclosure, or engineered PD-L1-binding complexes (e.g., comprising one or more PD-L1-binding peptides and one or additional active agents) can have properties that are superior to PD-L1-binding antibodies or target-binding antibodies (e.g., bispecific antibodies or chimeric antigen receptors). For example, the peptides and complexes described herein can provide superior, deeper, and/or faster tissue or cell penetration to cells and targeted tissues (e.g., brain parenchyma penetration, solid tumor penetration) and faster clearance from non-targeted tissues and serum. The PD-L1-binding peptides or PD-L1-binding peptide complexes of this disclosure can have lower molecular weights than PD-L1-binding antibodies. The lower molecular weight can confer advantageous properties on the PD-L1-binding peptides or PD-L1-binding peptide complexes of this disclosure as compared to PD-L1-binding antibodies. For example, the PD-L1-binding peptides or PD-L1-binding peptide complexes of this disclosure can penetrate a cell or tissue more readily than an anti-PD-L1 antibody or can have lower molar dose toxicity than an anti-PD-L1 antibody. In addition, the PD-L1 binding peptides or PD-L1-binding peptide complexes of this disclosure can form an immune synapse between an immune cell and a cancer cell that is of a better geometry to induce cancer cell killing. The PD-L1-binding peptides or PD-L1-binding peptide complexes of this disclosure can be advantageous for lacking the Fc function of an antibody. The PD-L1-binding peptides or PD-L1-binding peptide complexes of this disclosure can be advantageous for allowing higher concentrations, on a molar basis, of formulations. The PD-L1-binding peptides or PD-L1-binding peptide complexes of this disclosure can have a higher affinity or faster on-rate to PD-L1 than antibody or antibody fragments. The PD-L1-binding peptides or PD-L1-binding peptide complexes of this disclosure can also be targeted to cancer cells in the CNS or brain via blood brain barrier (BBB) penetrating moieties, such as BBB-penetrating CDPs, to better access CNS tumors which are otherwise inaccessible to antibodies.

[0187] CDPs (e.g., knotted peptides or hitchins) are a class of peptides, usually ranging from about 11 to about 81 amino acids in length that are often folded into a compact structure. Knotted peptides are typically assembled into a complex tertiary structure that is characterized by a number of intramolecular disulfide crosslinks and can contain beta strands, alpha helices, and other secondary structures. The presence of the disulfide bonds gives knotted peptides remarkable environmental stability, allowing them to withstand extremes of temperature and pH and to resist the proteolytic enzymes of the blood stream. The presence of a disulfide knot can provide resistance to reduction by reducing agents. The rigidity of knotted peptides also allows them to bind to targets without paying the “entropic penalty” that a floppy peptide accrues upon binding a target. For example, binding is adversely affected by the loss of entropy that occurs when a peptide binds a target to form a complex. Therefore, “entropic penalty” is the adverse effect on binding, and the greater the entropic loss that occurs upon this binding, the greater the “entropic penalty.” Furthermore, unbound molecules that are flexible lose more entropy when forming a complex than molecules that are rigidly structured, because of the loss of flexibility when bound up in a complex. However, rigidity in the unbound molecule also generally increases specificity by limiting the number of complexes that molecule can form. The peptides can bind targets with affinity comparable to or higher than that of an antibody, or with nanomolar or picomolar affinity. A wider examination of the sequence structure and sequence identity or homology of knotted peptides reveals that they have arisen by convergent evolution in all kinds of animals and plants. In animals, they are often found in venoms, for example, the venoms of spiders and scorpions and have been implicated in the modulation of ion channels. The knotted proteins of plants can inhibit the proteolytic enzymes of animals or have antimicrobial activity, suggesting that knotted peptides can function in molecular defense systems found in plants.

[0188] A peptide of the present disclosure (e.g., PD-L1-binding peptide) can comprise a cysteine amino acid residue. In some embodiments, the peptide has at least 1, at least 2, at least 3, at least 4, at least 5, at least 6, at least 7, at least 8, at least 9, or at least 10 cysteine amino acid residues. In some embodiments, the peptide has at least 6 cysteine amino acid residues. In some embodiments, the peptide has at least 8 cysteine amino acid residues. In other embodiments, the peptide has at least 10 cysteine amino acid residues, at least 12 cysteine amino acid residues, at least 14 cysteine amino acid residues or at least 16 cysteine amino acid residues. In some embodiments, a peptide of the present disclosure has an even number of cysteine residues. In some embodiments, all cysteines in a peptide of the present disclosure are engaged within cystine disulfide bonds.

[0189] A knotted peptide can comprise disulfide bridges. A knotted peptide can be a peptide wherein 5% or more of the residues are cysteines forming intramolecular disulfide bonds. A disulfide-linked peptide can be a drug scaffold. In some embodiments, the disulfide bridges form a knot. A disulfide bridge can be formed between cysteine residues, for example, between cysteines 1 and 4, 2 and 5, or, 3 and 6. In some embodiments, one disulfide bridge passes through a loop formed by the other two disulfide bridges, for example, to form the knot. In other embodiments, the disulfide bridges can be formed between any two cysteine residues.

[0190] Some peptides of the present disclosure can comprise at least one amino acid residue in an L configuration. A peptide can comprise at least one amino acid residue in D configuration. In some embodiments, a peptide is 15-75 amino acid residues long. In other embodiments, a peptide is 11-55 amino acid residues long. In still other embodiments, a peptide is 11-65 amino acid residues long. In further embodiments, a peptide is at least 20 amino acid residues long.

[0191] Some CDPs can be derived or isolated from a class of proteins known to be present or associated with toxins or venoms. In some cases, the peptide can be derived from toxins or venoms associated with scorpions or spiders. The peptide can be derived from venoms and toxins of spiders and scorpions of various genus and species. For example, the peptide can be derived from a venom or toxin of the Leiurus quinquestriatus hebraeus, Buthus occitanus tunetanus, Hottentotta judaicus, Mesobuthus eupeus, Buthus occitanus israelis, Hadrurus gertschi, Androctonus australis, Centruroides noxius, Heterometrus laoticus, Opistophthalmus carinatus, Haplopelma schmidti, Isometrus maculatus, Haplopelma huwenum, Haplopelma hainanum, Haplopelma schmidti, Agelenopsis aperta, Haydronyche versuta, Selenocosmia huwena, Heteropoda venatoria, Grammostola rosea, Ornithoctonus huwena, Hadronyche versuta, Atrax robustus, Angelenopsis aperta, Psalmopoeus cambridgei, Hadronyche infensa, Paracoelotes luctosus, and Chilobrachys jingzhaoor another suitable genus or species of scorpion or spider. In some cases, a peptide can be derived from a Buthus martensii Karsh (scorpion) toxin. In some cases, a CDP may be derived from subunit 6 of a cytochrome BC1 oxidoreductase or from an antimicrobial defensin.

[0192] In some embodiments, a peptide of the present disclosure (e.g., a PD-L1-binding peptide) can comprise a sequence having cysteine residues at one or more of corresponding positions 4, 8, 18, 32, 42, and 46, for example with reference to SEQ ID NO: 1. For example, in certain embodiments, a peptide can comprise a sequence having a cysteine residue at corresponding position 4. In certain embodiments, a peptide can comprise a sequence having a cysteine residue at corresponding position 8. In certain embodiments, a peptide can comprise a sequence having a cysteine residue at corresponding position 18. In certain embodiments, a peptide can comprise a sequence having a cysteine residue at corresponding position 32. In certain embodiments, a peptide can comprise a sequence having a cysteine residue at corresponding position 42. In certain embodiments, a peptide can comprise a sequence having a cysteine residue at corresponding position 46. In some embodiments, a peptide comprises cysteines at corresponding positions n, n+4±2, n+14±2, n+28±2, n+38±2, or n+42±2, or any combination thereof, where n corresponds to an amino acid position of a first cysteine residue (e.g., position 4 of SEQ ID NO: 1). In some embodiments, a peptide comprises cysteines at corresponding positions n, n+4, n+14, n+28, n+38, or n+42, or any combination thereof, where n corresponds to an amino acid position of a first cysteine residue (e.g., position 4 of SEQ ID NO: 1). For example, a peptide of the present disclosure can comprise a sequence having cysteines positioned such that a second cysteine residue is positioned 4 amino acid residues toward the peptide C-terminus from a first cysteine residue, a third cysteine residue is positioned 14 amino acid residues toward the peptide C-terminus from the first cysteine residue, a fourth cysteine residue is positioned 28 amino acid residues toward the peptide C-terminus from the first cysteine residue, a fifth cysteine residue is positioned 38 amino acid residues toward the peptide C-terminus from the first cysteine residue, a sixth cysteine residue is positioned 42 amino acid residues toward the peptide C-terminus from the first cysteine residue, or combinations thereof. In some embodiments, a peptide of the present disclosure can comprise a sequence having cysteines spaced such that there are 3 amino acid residues between a first cysteine and a second cysteine, 9 amino acid residues between a second cysteine and a third cysteine, 13 amino acid residues between a third cysteine and a fourth cysteine, 9 amino acid residues between a fourth cysteine and a fifth cysteine, 3 amino acid residues between a fifth cysteine and a sixth cysteine, or combinations thereof.

[0193] In some embodiments, a peptide of the present disclosure (e.g., a PD-L1-binding peptide) can comprise a sequence having cysteine residues at one or more of corresponding positions 4, 15, 21, 25, 35, 42, 44, 48, for example with reference to SEQ ID NO: 58. For example, in certain embodiments, a peptide can comprise a sequence having a cysteine residue at corresponding position 4. In certain embodiments, a peptide can comprise a sequence having a cysteine residue at corresponding position 15. In certain embodiments, a peptide can comprise a sequence having a cysteine residue at corresponding position 21. In certain embodiments, a peptide can comprise a sequence having a cysteine residue at corresponding position 25. In certain embodiments, a peptide can comprise a sequence having a cysteine residue at corresponding position 35. In certain embodiments, a peptide can comprise a sequence having a cysteine residue at corresponding position 42. In certain embodiments, a peptide can comprise a sequence having a cysteine residue at corresponding position 44. In certain embodiments, a peptide can comprise a sequence having a cysteine residue at corresponding position 48. In some embodiments, a peptide comprises cysteines at corresponding positions n, n+11±2, n+17±2, n+21±2, n+31±2, n+38±2, n+40±2, or n+44±2 or any combination thereof, where n corresponds to an amino acid position of a first cysteine residue (e.g., position 4 of SEQ ID NO: 58). In some embodiments, a peptide comprises cysteines at corresponding positions n, n+11, n+17, n+21, n+31, n+38, n+40, or n+44, or any combination thereof, where n corresponds to an amino acid position of a first cysteine residue (e.g., position 4 of SEQ ID NO: 58). For example, a peptide of the present disclosure can comprise a sequence having cysteines positioned such that a second cysteine residue is positioned 11 amino acid residues toward the peptide C-terminus from a first cysteine residue, a third cysteine residue is positioned 17 amino acid residues toward the peptide C-terminus from the first cysteine residue, a fourth cysteine residue is positioned 21 amino acid residues toward the peptide C-terminus from the first cysteine residue, a fifth cysteine residue is positioned 31 amino acid residues toward the peptide C-terminus from the first cysteine residue, a sixth cysteine residue is positioned 38 amino acid residues toward the peptide C-terminus from the first cysteine residue, a seventh cysteine residue is positioned 40 amino acid residues toward the peptide C-terminus from the first cysteine residue, an eighth cysteine residue is positioned 44 amino acid residues toward the peptide C-terminus from the first cysteine residue, or combinations thereof. In some embodiments, a peptide of the present disclosure can comprise a sequence having cysteines spaced such that there are 10 amino acid residues between a first cysteine and a second cysteine, 5 amino acid residues between a second cysteine and a third cysteine, 3 amino acid residues between a third cysteine and a fourth cysteine, 9 amino acid residues between a fourth cysteine and a fifth cysteine, 6 amino acid residues between a fifth cysteine and a sixth cysteine, 1 amino acid residue between a sixth cysteine and a seventh cysteine, 3 amino acid residues between a seventh cysteine and an eighth cysteine, or combinations thereof.

[0194] In some embodiments, peptides of the present disclosure (e.g., PD-L1-binding peptides) comprise at least one cysteine residue. In some embodiments, peptides of the present disclosure comprise at least two cysteine residues. In some embodiments, peptides of the present disclosure comprise at least three cysteine residues. In some embodiments, peptides of the present disclosure comprise at least four cysteine residues. In some embodiments, peptides of the present disclosure comprise at least five cysteine residues. In some embodiments, peptides of the present disclosure comprise at least six cysteine residues. In some embodiments, peptides of the present disclosure comprise at least eight cysteine residues. In some embodiments, peptides of the present disclosure comprise at least ten cysteine residues. In some embodiments, a peptide of the present disclosure comprises six cysteine residues. In some embodiments, a peptide of the present disclosure comprises seven cysteine residues. In some embodiments, a peptide of the present disclosure comprises eight cysteine residues. In some embodiments, a peptide of the present disclosure comprises nine cysteine residues.

[0195] In some embodiments, the first cysteine residue in the sequence can be disulfide bonded with the 4th cysteine residue in the sequence, the 2nd cysteine residue in the sequence can be disulfide bonded to the 5th cysteine residue in the sequence, and the 3rd cysteine residue in the sequence can be disulfide bonded to the 6th cysteine residue in the sequence. Optionally, a peptide can comprise one disulfide bridge that passes through a ring formed by two other disulfide bridges, also known as a “two-and-through” structure system. In some embodiments, the peptides disclosed herein can have one or more cysteines mutated to serine. In some embodiments, the first cysteine residue in the sequence (e.g., at position 4 of SEQ ID NO: 1) can be disulfide bonded with the 6th cysteine residue in the sequence (e.g., at position 46 of SEQ ID NO: 1), the 2nd cysteine residue in the sequence (e.g., at position 8 of SEQ ID NO: 1) can be disulfide bonded to the 5th cysteine residue in the sequence (e.g., at position 42 of SEQ ID NO: 1), and the 3rd cysteine residue in the sequence (e.g., at position 18 of SEQ ID NO: 1) can be disulfide bonded to the 4th cysteine residue in the sequence (e.g., at position 32 of SEQ ID NO: 1). In some embodiments, this disulfide bond structure may be present in a peptide of any one of SEQ ID NO: 1-SEQ ID NO: 4, SEQ ID NO: 8-SEQ ID NO: 57, SEQ ID NO: 59-SEQ ID NO: 63, SEQ ID NO: 67-SEQ ID NO: 116, SEQ ID NO: 118, SEQ ID NO: 435, SEQ ID NO: 436, or SEQ ID NO: 554-SEQ ID NO: 567.

[0196] In some embodiments, the first cysteine residue in the sequence (e.g., at position 4 of SEQ ID NO: 58) can be disulfide bonded with the 8th cysteine residue in the sequence (e.g., at position 48 of SEQ ID NO: 58), the 2nd cysteine residue in the sequence (e.g., at position 15 of SEQ ID NO: 58) can be disulfide bonded to the 5th cysteine residue in the sequence (e.g., at position 35 of SEQ ID NO: 58), the 3rd cysteine residue in the sequence (e.g., at position 21 of SEQ ID NO: 58) can be disulfide bonded to the 6th cysteine residue in the sequence (e.g., at position 42 of SEQ ID NO: 58), and the 4th cysteine residue in the sequence (e.g., at position 25 of SEQ ID NO: 58) can be disulfide bonded to the 7th cysteine residue in the sequence (e.g., at position 44 of SEQ ID NO: 58).

[0197] In some embodiments, a peptide of the present disclosure (e.g., a PD-L1-binding peptide) comprises an amino acid sequence having cysteine residues at one or more positions, for example with reference to SEQ ID NO: 1. In some embodiments, the one or more cysteine residues are located at any of the corresponding amino acid positions 4, 8, 18, 32, 42, 46, or any combination thereof. In some embodiments, the one or more cysteine residues are located at any of the corresponding amino acid positions 4, 15, 21, 25, 35, 42, 44, 48, or any combination thereof. In some aspects of the present disclosure, the one or more cysteine (C) residues participate in disulfide bonds with various pairing patterns (e.g., C¹⁰-C²⁰). In some embodiments, the peptides as described herein comprise at least one, at least two, at least three, or at least four disulfide bonds. In some embodiments, peptides as described herein comprise three disulfide bonds with the corresponding pairing patterns C⁴-C⁴⁶, C⁸-C⁴², and C¹⁸-C³². In some embodiments, peptides as described herein comprise four disulfide bonds with the corresponding pairing patterns C⁴-C⁴⁸, C¹⁵-C³⁵, C²¹-C⁴², and C²⁵-C⁴⁴. In some embodiments, peptides as described herein comprise three disulfide bonds with the corresponding pairing patterns C¹⁵-C³⁵, C²¹-C⁴², and C²⁵-C⁴⁴.

[0198] In some instances, one or more or all of the methionine residues in the peptide are replaced by leucine or isoleucine. In some instances, one or more or all of the tryptophan residues in the peptide are replaced by phenylalanine or tyrosine. In some instances, one or more or all of the asparagine residues in the peptide are replaced by glutamine. In some embodiments, the N-terminus of the peptide is blocked, such as by an acetyl group. Alternatively or in combination, in some instances, the C-terminus of the peptide is blocked, such as by an amide group. In some embodiments, the peptide is modified by methylation on free amines. For example, full methylation can be accomplished through the use of reductive methylation with formaldehyde and sodium cyanoborohydride.

### PD-L1-Binding Peptides

[0199] Disclosed herein are peptide sequences, such as those listed in TABLE 1, capable of binding to PD-L1, or any combination or fragment (e.g., ectodomain) thereof. A peptide capable of binding PD-L1 can be referred to herein as a PD-L1-binding peptide. In some embodiments, peptides disclosed herein can penetrate, cross, or enter target cells or can be modified to penetrate, cross, or enter target cells (e.g., PD-L1 positive cells). In some embodiments, peptides disclosed herein can penetrate or cross, or can be modified to penetrate or cross, a blood brain barrier (BBB). In some cases, a PD-L1-binding peptide may be part of a PD-L1-binding peptide complex comprising a PD-L1-binding peptide conjugated to, linked to, or fused to an additional active agent (e.g., a therapeutic agent, a detectable agent, or an immune cell targeting agent) such as a small molecule or a peptide that has an affinity for an additional target protein (e.g., an immune cell surface protein). In some cases, a peptide complex of the present disclosure exerts a biological effect that is mediated by the PD-L1-binding peptide, the additional active agent, or a combination thereof.

[0200] In some embodiments, PD-L1-binding peptides of the present disclosure, including peptides with amino acid sequences set forth in SEQ ID NO: 1-SEQ ID NO: 118, SEQ ID NO: 435, SEQ ID NO: 436, or SEQ ID NO: 554-SEQ ID NO: 567, and any derivatives or variant thereof, prevent or decrease the binding of endogenous PD-L1 binders (e.g., PD-1) to PD-L1. The PD-L1-binding peptides of the present disclosure (e.g., any one of SEQ ID NO: 1-SEQ ID NO: 118, SEQ ID NO: 435, SEQ ID NO: 436, or SEQ ID NO: 554-SEQ ID NO: 567) may compete with PD-1 for binding to PD-L1. A PD-L1-binding peptide may displace PD-1 from PD-L1. In some embodiments, a PD-L1-binding peptide may inhibit PD-1 binding to PD-L1 or displace PD-1 from PD-L1 in a subject (e.g., a human subject) with a half maximum inhibitory concentration (IC₅₀) of from about 1 pM to about 10 μM, from about 10 pM to about 10 μM, from about 100 pM to about 10 μM, from about 300 pM to about 10 μM, from about 500 pM to about 10 μM, from about 1 pM to about 1 pM, from about 10 pM to about 1 μM, from about 100 pM to about 1 μM, from about 300 pM to about 1 μM, from about 500 pM to about 1 μM, from about 1 pM to about 100 nM, from about 10 pM to about 100 nM, from about 100 pM to about 100 nM, from about 300 pM to about 100 nM, from about 500 pM to about 100 nM, from about 1 pM to about 10 nM, from about 10 pM to about 10 nM, from about 100 pM to about 10 nM, from about 300 pM to about 10 nM, from about 500 pM to about 10 nM, from about 1 pM to about 1 nM, from about 10 pM to about 1 nM, from about 100 pM to about 1 nM, from about 1 pM to about 500 pM, from about 10 pM to about 500 pM, or from about 100 pM to about 500 pM. In some embodiments, a PD-L1-binding peptide may inhibit PD-1 binding to PD-L1 or displace PD-1 from PD-L1 on a cell (e.g., a human cell) under physiological conditions with a half maximum inhibitory concentration (IC₅₀) of from about 1 pM to about 1 pM, from about 10 pM to about 1 μM, from about 100 pM to about 1 μM, from about 300 pM to about 1 pM, from about 500 pM to about 1 μM, from about 1 pM to about 100 nM, from about 10 pM to about 100 nM, from about 100 pM to about 100 nM, from about 300 pM to about 100 nM, from about 500 pM to about 100 nM, from about 1 pM to about 10 nM, from about 10 pM to about 10 nM, from about 100 pM to about 10 nM, from about 300 pM to about 10 nM, from about 500 pM to about 10 nM, from about 1 pM to about 1 nM, from about 10 pM to about 1 nM, from about 100 pM to about 1 nM, from about 1 pM to about 500 pM, from about 10 pM to about 500 pM, or from about 100 pM to about 500 pM.

[0201] In some embodiments, peptides of the present disclosure comprise derivatives and variants with at least 40% homology, at least 50% homology, at least 60% homology, at least 70% homology, at least 75% homology, at least 80% homology, at least 85% homology, at least 90% homology, at least 91% homology, at least 92% homology, at least 93% homology, at least 94% homology, at least 95% homology, at least 96% homology, at least 97% homology, at least 98% homology, or at least 99% homology or 100% homology to amino acid sequences set forth in SEQ ID NO: 1-SEQ ID NO: 118, SEQ ID NO: 435, SEQ ID NO: 436, or SEQ ID NO: 554-SEQ ID NO: 567. For example, a PD-L1-binding peptide may comprise a sequence having at least 40% homology, at least 50% homology, at least 60% homology, at least 70% homology, at least 75% homology, at least 80% homology, at least 85% homology, at least 90% homology, at least 91% homology, at least 92% homology, at least 93% homology, at least 94% homology, at least 95% homology, at least 96% homology, at least 97% homology, at least 98% homology, or at least 99% homology or 100% homology to an amino acid sequence set forth in SEQ ID NO: 1-SEQ ID NO: 118, SEQ ID NO: 435, SEQ ID NO: 436, or SEQ ID NO: 554-SEQ ID NO: 567.

[0202] In some embodiments, PD-L1-binding peptides bind to PD-L1 with equal, similar, or greater affinity (e.g., lower equilibrium dissociation constant, K_{D}) as compared to endogenous molecules (e.g., PD-1), or any other endogenous PD-L1 ligands) or other exogenous molecules (e.g., PD-L1-binding antibodies or antibody fragments). In some embodiments, the peptide or peptide complex can have a K_{D} for PD-L1 binding of no greater than 50 μM, no greater than 5 μM, no greater than 500 nM, no greater than 100 nM, no greater than 40 nM, no greater than 30 nM, no greater than 20 nM, no greater than 15 nM, no greater than 10 nM, no greater than 5 nM, no greater than 2 nM, no greater than 1 nM, no greater than 0.9 nM, no greater than 0.8 nM, no greater than 0.7 nM, no greater than 0.6 nM, no greater than 0.5 nM, no greater than 0.4 nM, no greater than 0.3 nM, no greater than 0.2 nM, or no greater than 0.1 nM. In some embodiments, PD-L1-binding peptides that exhibit an improved PD-L1 binding show improved recruitment to PD-L1 positive cells, improved inhibition of PD-L1 or of PD-1 binding, improved active agent delivery, improved immune cell recruitment, improved cell killing, improved tumor regression, or combinations thereof. In some embodiments, the K_{A}, K_{D}, kₒₙ, k_{off} values, or combinations thereof of a PD-L1-binding peptide can be modulated and optimized (e.g., via amino acid substitutions) to provide a preferred ratio of PD-L1-binding affinity, rate of binding to PD-L1, rate of release from PD-L1, or combinations thereof. In some embodiments, the PD-L1-binding peptide binds at a site of low homology between human and murine PD-L1, reducing cross-reactivity of the PD-L1-binding peptides for human and murine PD-L1. Binding kinetics of CDPs differ from those of antibodies, so bispecific molecules containing a PD-L1-binding CDP and an antibody could have different behaviors than antibody-based molecules. The PD-L1-binding CDPs described herein may have a faster on-rate to PD-L1 than that of an antibody-based molecule.

[0203] In some embodiments, peptides disclosed herein or variants thereof bind to PD-L1 at residues found in the binding interface (e.g., the binding domain or the binding pocket) of PD-L1 with other exogenous or endogenous ligands (e.g., PD-1, PD-1 derivatives, or PD-1-like peptides or proteins). In some embodiments, a peptide disclosed herein or a variant thereof, which binds to PD-L1, comprises at least 70% homology, at least 75% homology, at least 80% homology, at least 85% homology, at least 90% homology, at least 95% homology, at least 96% homology, at least 97% homology, at least 98% homology, or at least 99% homology or at least 100% homology to a sequence that binds residues of PD-L1, which makeup the binding pocket. In some embodiments, a peptide disclosed herein or a variant thereof, which binds to PD-L1, comprises at least 70% homology, at least 75% homology, at least 80% homology, at least 85% homology, at least 90% homology, at least 95% homology, at least 96% homology, at least 97% homology, at least 98% homology, or at least 99% homology or at least 100% homology to an endogenous or exogenous polypeptide known to bind PD-L1, for example, endogenous PD-1 or any one of the peptides listed in TABLE 1. In other embodiments, a peptide described herein binds to a protein of interest, which comprises at least 70% homology, at least 75% homology, at least 80% homology, at least 85% homology, at least 90% homology, at least 95% homology, at least 96% homology, at least 97% homology, at least 98% homology, or at least 99% homology or at least 100% homology to PD-L1, a fragment, homolog, or a variant thereof.

[0204] In other embodiments, a nucleic acid, vector, plasmid, or donor DNA comprises a sequence that encodes a peptide, peptide construct, a peptide complex, or variant or functional fragment thereof, as described in the present disclosure. In further embodiments, certain parts or fragments of PD-L1-binding motifs (e.g., conserved binding motifs) can be grafted onto a peptide or peptide complex with a sequence of any one of SEQ ID NO: 1-SEQ ID NO: 118, SEQ ID NO: 435, SEQ ID NO: 436, or SEQ ID NO: 554-SEQ ID NO: 567.

[0205] In some embodiments, a peptide can be selected for further testing or use based upon its ability to bind to the certain amino acid residue or motif of amino acid residues. The certain amino acid residue or motif of amino acid residues in PD-L1 can be identified an amino acid residue or sequence of amino acid residues that are involved in the binding of PD-L1 to PD-1. A certain amino acid residue or motif of amino acid residues can be identified from a crystal structure of the PD-L1:PD-1 complex. In some embodiments, peptides (e.g., CDPs) demonstrate the resistance to heat, protease (e.g., pepsin, trypsin, or other), and reduction.

[0206] The peptides and peptide complexes (e.g., peptide conjugates or fusion peptides) comprising one or more of the amino acid sequences set forth in SEQ TD NO: 1-SEQ ID NO: 118, SEQ ID NO: 435, SEQ ID NO: 436, or SEQ ID NO: 554-SEQ ID NO: 567 can bind to a protein of interest. In some embodiments, the protein of interest is a PD-L1. In some embodiments, the peptides and peptide complexes (e.g., peptide conjugates or fusion peptides) that bind to a PD-L1 comprise at least one of the amino acid sequences set forth in SEQ TD NO: 1-SEQ ID NO: 118, SEQ ID NO: 435, SEQ ID NO: 436, or SEQ ID NO: 554-SEQ ID NO: 567. TABLE 1 lists exemplary peptide sequences according to the methods and compositions of the present disclosure.

TABLE 1
Exemplary PD-L1-Binding Peptides

| SEQ ID NO: | Sequence |
|---|---|
| SEQ ID NO: 1 | EEDCKVHCVKEWMAGKACAERQKSYTIGRAHCSGQKFDVFKCLD |
| | HCAAP |
| SEQ ID NO: 2 | EEDCKVHCVKEWMAGKACAERDKSYTIGRAHCSGQKFDVFKCLD |
| | HCAAP |
| SEQ ID NO: 3 | EEDCKVHCVKEWMAGKACAERNKSYTIGRAHCSGQKFDVFKCLD |
| | HCAAP |
| SEQ ID NO: 4 | EEDCKVHCVKEWAAYKACAERIKSYTIGRAHCSGQYFDVWKCLD |
| | HCAAP |
| SEQ ID NO: 5 | ARTCESQSHRFKGPCVSMTNCASVCRTERFSGGHCRGFRRRCLCT |
| | KHC |
| SEQ ID NO: 6 | ARTCESQSHRFKGPCVSDTNCASVCYTERFSGGHCRGFRRRCLCTK |
| | HC |
| SEQ ID NO: 7 | ARTCESQSHRFKGPCVSDTNCASVCRTERFSGGHCMGFRRRCLCT |
| | KHC |
| SEQ ID NO: 8 | EEDCKVHCVKWWMAGKACAERNKSYTIGRAHCSGQKFDVFKCL |
| | DHCAAP |
| SEQ ID NO: 9 | EEDCKVHCVKEWMAGKACAERNKSYTIGRAHCSGQKFDVFKCLD |
| | HCAAP |
| SEQ ID NO: 10 | EEDCKVHCVKWWAAGKACAERNKSYTIGRAHCSGQKFDVFKCL |
| | DHCAAP |
| SEQ ID NO: 11 | EEDCKVHCVKWWMAYKACAERNKSYTIGRAHCSGQKFDVFKCL |
| | DHCAAP |
| SEQ ID NO: 12 | EEDCKVHCVKWWMAGKACAERIKSYTIGRAHCSGQKFDVFKCLD |
| | HCAAP |
| SEQ ID NO: 13 | EEDCKVHCVKWWMAGKACAERNKSYTIGRAHCSGQYFDVFKCL |
| | DHCAAP |
| SEQ ID NO: 14 | EEDCKVHCVKWWMAGKACAERNKSYTIGRAHCSGQKFDVWKCL |
| | DHCAAP |
| SEQ ID NO: 15 | EEDCKVHCVKWWAAYKACAERIKSYTIGRAHCSGQYFDVWKCL |
| | DHCAAP |
| SEQ ID NO: 16 | EEDCKVHCVKEWMAYKACAERIKSYTIGRAHCSGQYFDVWKCLD |
| | HCAAP |
| SEQ ID NO: 17 | EEDCKVHCVKEWAAGKACAERIKSYTIGRAHCSGQYFDVWKCLD |
| | HCAAP |
| SEQ ID NO: 18 | EEDCKVHCVKEWAAYKACAERNKSYTIGRAHCSGQYFDVWKCL |
| | DHCAAP |
| SEQ ID NO: 19 | EEDCKVHCVKEWAAYKACAERIKSYTIGRAHCSGQKFDVWKCLD |
| | HCAAP |
| SEQ ID NO: 20 | EEDCKVHCVKEWAAYKACAERIKSYTIGRAHCSGQYFDVFKCLD |
| | HCAAP |
| SEQ ID NO: 21 | EEDCKVHCVKEWMAGKACAERIKSYTIGRAHCSGQYFDVWKCLD |
| | HCAAP |
| SEQ ID NO: 22 | EEDCKVHCVKEWMAYKACAERNKSYTIGRAHCSGQYFDVWKCL |
| | DHCAAP |
| SEQ ID NO: 23 | EEDCKVHCVKEWMAYKACAERIKSYTIGRAHCSGQKFDVWKCLD |
| | HCAAP |
| SEQ ID NO: 24 | EEDCKVHCVKEWMAYKACAERIKSYTIGRAHCSGQYFDVFKCLD |
| | HCAAP |
| SEQ ID NO: 25 | EEDCKVHCVKEWAAGKACAERNKSYTIGRAHCSGQYFDVWKCL |
| | DHCAAP |
| SEQ ID NO: 26 | EEDCKVHCVKEWAAGKACAERIKSYTIGRAHCSGQKFDVWKCLD |
| | HCAAP |
| SEQ ID NO: 27 | EEDCKVHCVKEWAAGKACAERIKSYTIGRAHCSGQYFDVFKCLD |
| | HCAAP |
| SEQ ID NO: 28 | EEDCKVHCVKEWAAYKACAERNKSYTIGRAHCSGQKFDVWKCL |
| | DHCAAP |
| SEQ ID NO: 29 | EEDCKVHCVKEWAAYKACAERNKSYTIGRAHCSGQYFDVFKCLD |
| | HCAAP |
| SEQ ID NO: 30 | EEDCKVHCVKEWAAYKACAERIKSYTIGRAHCSGQKFDVFKCLD |
| | HCAAP |
| SEQ ID NO: 31 | EEDCKVHCVKEWMAGKACAERQKSDTTGQAHCSGQKFDVFKCL |
| | DHCAAP |
| SEQ ID NO: 32 | EEDCKVHCVKEWMAGKACAERNKSDTTGQAHCSGQKFDVFKCL |
| | DHCAAP |
| SEQ ID NO: 33 | EEDCKVHCVKEWAAYKACAERIKSDTTGQAHCSGQYFDVWKCL |
| | DHCAAP |
| SEQ ID NO: 34 | EEDCKVHCVKWWMAGKACAERNKSDTTGQAHCSGQKFDVFKCL |
| | DHCAAP |
| SEQ ID NO: 35 | EEDCKVHCVKEWMAGKACAERNKSDTTGQAHCSGQKFDVFKCL |
| | DHCAAP |
| SEQ ID NO: 36 | EEDCKVHCVKWWAAGKACAERNKSDTTGQAHCSGQKFDVFKCL |
| | DHCAAP |
| SEQ ID NO: 37 | EEDCKVHCVKWWMAYKACAERNKSDTTGQAHCSGQKFDVFKCL |
| | DHCAAP |
| SEQ ID NO: 38 | EEDCKVHCVKWWMAGKACAERIKSDTTGQAHCSGQKFDVFKCL |
| | DHCAAP |
| SEQ ID NO: 39 | EEDCKVHCVKWWMAGKACAERNKSDTTGQAHCSGQYFDVFKCL |
| | DHCAAP |
| SEQ ID NO: 40 | EEDCKVHCVKWWMAGKACAERNKSDTTGQAHCSGQKFDVWKC |
| | LDHCAAP |
| SEQ ID NO: 41 | EEDCKVHCVKWWAAYKACAERIKSDTTGQAHCSGQYFDVWKCL |
| | DHCAAP |
| SEQ ID NO: 42 | EEDCKVHCVKEWMAYKACAERIKSDTTGQAHCSGQYFDVWKCL |
| | DHCAAP |
| SEQ ID NO: 43 | EEDCKVHCVKEWAAGKACAERIKSDTTGQAHCSGQYFDVWKCL |
| | DHCAAP |
| SEQ ID NO: 44 | EEDCKVHCVKEWAAYKACAERNKSDTTGQAHCSGQYFDVWKCL |
| | DHCAAP |
| SEQ ID NO: 45 | EEDCKVHCVKEWAAYKACAERIKSDTTGQAHCSGQKFDVWKCL |
| | DHCAAP |
| SEQ ID NO: 46 | EEDCKVHCVKEWAAYKACAERIKSDTTGQAHCSGQYFDVFKCLD |
| | HCAAP |
| SEQ ID NO: 47 | EEDCKVHCVKEWMAGKACAERIKSDTTGQAHCSGQYFDVWKCL |
| | DHCAAP |
| SEQ ID NO: 48 | EEDCKVHCVKEWMAYKACAERNKSDTTGQAHCSGQYFDVWKCL |
| | DHCAAP |
| SEQ ID NO: 49 | EEDCKVHCVKEWMAYKACAERIKSDTTGQAHCSGQKFDVWKCL |
| | DHCAAP |
| SEQ ID NO: 50 | EEDCKVHCVKEWMAYKACAERIKSDTTGQAHCSGQYFDVFKCLD |
| | HCAAP |
| SEQ ID NO: 51 | EEDCKVHCVKEWAAGKACAERNKSDTTGQAHCSGQYFDVWKCL |
| | DHCAAP |
| SEQ ID NO: 52 | EEDCKVHCVKEWAAGKACAERIKSDTTGQAHCSGQKFDVWKCL |
| | DHCAAP |
| SEQ ID NO: 53 | EEDCKVHCVKEWAAGKACAERIKSDTTGQAHCSGQYFDVFKCLD |
| | HCAAP |
| SEQ ID NO: 54 | EEDCKVHCVKEWAAYKACAERNKSDTTGQAHCSGQKFDVWKCL |
| | DHCAAP |
| SEQ ID NO: 55 | EEDCKVHCVKEWAAYKACAERNKSDTTGQAHCSGQYFDVFKCL |
| | DHCAAP |
| SEQ ID NO: 56 | EEDCKVHCVKEWAAYKACAERIKSDTTGQAHCSGQKFDVFKCLD |
| | HCAAP |
| SEQ ID NO: 57 | EESCKPQCVKAWLEYQACAERVEKDESGEAHCTGQYFDLWGCVD |
| | KCVAP |
| SEQ ID NO: 58 | ARTCESQSHRFKGPCVSDTMCASVCRTERFSGGHCRGFRRRCLCS |
| | KHC |
| SEQ ID NO: 59 | EERCMPQCVKSLYEYEKCLKRVENDDTGHKHCTGHYFDYWSCID |
| | KCVAS |
| SEQ ID NO: 435 | EEDCRVHCVREWMAGRACAERDRSYTIGRAHCSGQRFDVFRCLD |
| | HCAAP |
| SEQ ID NO: 554 | EHDCKVHCVKEWMAGHACAERQKSYTIGRAHCSGQKFDVFKCLD |
| | HCAAP |
| SEQ ID NO: 555 | EHDCKVHCVKEWMAGKACAERQKSYTIGRAHCSGQKFDVFKCLD |
| | HCAAP |
| SEQ ID NO: 556 | EEDCKVHCVKEWHAGKACAERQKSYTIGRAHCSGQKFDVFKCLD |
| | HCAAP |
| SEQ ID NO: 557 | EEDCKVHCVKEWMAGHACAERQKSYTIGRAHCSGQKFDVFKCLD |
| | HCAAP |
| SEQ ID NO: 558 | EHDCKVHCVKEWHAGKACAERQKSYTIGRAHCSGQKFDVFKCLD |
| | HCAAP |
| SEQ ID NO: 559 | EEDCKVHCVKEWHAGHACAERQKSYTIGRAHCSGQKFDVFKCLD |
| | HCAAP |
| SEQ ID NO: 560 | EHDCKVHCVKEWHAGHACAERQKSYTIGRAHCSGQKFDVFKCLD |
| | HCAAP |
| SEQ ID NO: 60 | GSEEDCKVHCVKEWMAGKACAERQKSYTIGRAHCSGQKFDVFKC |
| | LDHCAAP |
| SEQ ID NO: 61 | GSEEDCKVHCVKEWMAGKACAERDKSYTIGRAHCSGQKFDVFKC |
| | LDHCAAP |
| SEQ ID NO: 62 | GSEEDCKVHCVKEWMAGKACAERNKSYTIGRAHCSGQKFDVFKC |
| | LDHCAAP |
| SEQ ID NO: 63 | GSEEDCKVHCVKEWAAYKACAERIKSYTIGRAHCSGQYFDVWKC |
| | LDHCAAP |
| SEQ ID NO: 64 | GSARTCESQSHRFKGPCVSMTNCASVCRTERFSGGHCRGFRRRCL |
| | CTKHC |
| SEQ ID NO: 65 | GSARTCESQSHRFKGPCVSDTNCASVCYTERFSGGHCRGFRRRCLC |
| | TKHC |
| SEQ ID NO: 66 | GSARTCESQSHRFKGPCVSDTNCASVCRTERFSGGHCMGFRRRCL |
| | CTKHC |
| SEQ ID NO: 67 | GSEEDCKVHCVKWWMAGKACAERNKSYTIGRAHCSGQKFDVFK |
| | CLDHCAAP |
| SEQ ID NO: 68 | GSEEDCKVHCVKEWMAGKACAERNKSYTIGRAHCSGQKFDVFKC |
| | LDHCAAP |
| SEQ ID NO: 69 | GSEEDCKVHCVKWWAAGKACAERNKSYTIGRAHCSGQKFDVFKC |
| | LDHCAAP |
| SEQ ID NO: 70 | GSEEDCKVHCVKWWMAYKACAERNKSYTIGRAHCSGQKFDVFK |
| | CLDHCAAP |
| SEQ ID NO: 71 | GSEEDCKVHCVKWWMAGKACAERIKSYTIGRAHCSGQKFDVFKC |
| | LDHCAAP |
| SEQ ID NO: 72 | GSEEDCKVHCVKWWMAGKACAERNKSYTIGRAHCSGQYFDVFK |
| | CLDHCAAP |
| SEQ ID NO: 73 | GSEEDCKVHCVKWWMAGKACAERNKSYTIGRAHCSGQKFDVWK |
| | CLDHCAAP |
| SEQ ID NO: 74 | GSEEDCKVHCVKWWAAYKACAERIKSYTIGRAHCSGQYFDVWKC |
| | LDHCAAP |
| SEQ ID NO: 75 | GSEEDCKVHCVKEWMAYKACAERIKSYTIGRAHCSGQYFDVWKC |
| | LDHCAAP |
| SEQ ID NO: 76 | GSEEDCKVHCVKEWAAGKACAERIKSYTIGRAHCSGQYFDVWKC |
| | LDHCAAP |
| SEQ ID NO: 77 | GSEEDCKVHCVKEWAAYKACAERNKSYTIGRAHCSGQYFDVWK |
| | CLDHCAAP |
| SEQ ID NO: 78 | GSEEDCKVHCVKEWAAYKACAERIKSYTIGRAHCSGQKFDVWKC |
| | LDHCAAP |
| SEQ ID NO: 79 | GSEEDCKVHCVKEWAAYKACAERIKSYTIGRAHCSGQYFDVFKCL |
| | DHCAAP |
| SEQ ID NO: 80 | GSEEDCKVHCVKEWMAGKACAERIKSYTIGRAHCSGQYFDVWKC |
| | LDHCAAP |
| SEQ ID NO: 81 | GSEEDCKVHCVKEWMAYKACAERNKSYTIGRAHCSGQYFDVWK |
| | CLDHCAAP |
| SEQ ID NO: 82 | GSEEDCKVHCVKEWMAYKACAERIKSYTIGRAHCSGQKFDVWKC |
| | LDHCAAP |
| SEQ ID NO: 83 | GSEEDCKVHCVKEWMAYKACAERIKSYTIGRAHCSGQYFDVFKC |
| | LDHCAAP |
| SEQ ID NO: 84 | GSEEDCKVHCVKEWAAGKACAERNKSYTIGRAHCSGQYFDVWK |
| | CLDHCAAP |
| SEQ ID NO: 85 | GSEEDCKVHCVKEWAAGKACAERIKSYTIGRAHCSGQKFDVWKC |
| | LDHCAAP |
| SEQ ID NO: 86 | GSEEDCKVHCVKEWAAGKACAERIKSYTIGRAHCSGQYFDVFKCL |
| | DHCAAP |
| SEQ ID NO: 87 | GSEEDCKVHCVKEWAAYKACAERNKSYTIGRAHCSGQKFDVWK |
| | CLDHCAAP |
| SEQ ID NO: 88 | GSEEDCKVHCVKEWAAYKACAERNKSYTIGRAHCSGQYFDVFKC |
| | LDHCAAP |
| SEQ ID NO: 89 | GSEEDCKVHCVKEWAAYKACAERIKSYTIGRAHCSGQKFDVFKCL |
| | DHCAAP |
| SEQ ID NO: 90 | GSEEDCKVHCVKEWMAGKACAERQKSDTTGQAHCSGQKFDVFK |
| | CLDHCAAP |
| SEQ ID NO: 91 | GSEEDCKVHCVKEWMAGKACAERNKSDTTGQAHCSGQKFDVFK |
| | CLDHCAAP |
| SEQ ID NO: 92 | GSEEDCKVHCVKEWAAYKACAERIKSDTTGQAHCSGQYFDVWKC |
| | LDHCAAP |
| SEQ ID NO: 93 | GSEEDCKVHCVKWWMAGKACAERNKSDTTGQAHCSGQKFDVFK |
| | CLDHCAAP |
| SEQ ID NO: 94 | GSEEDCKVHCVKEWMAGKACAERNKSDTTGQAHCSGQKFDVFK |
| | CLDHCAAP |
| SEQ ID NO: 95 | GSEEDCKVHCVKWWAAGKACAERNKSDTTGQAHCSGQKFDVFK |
| | CLDHCAAP |
| SEQ ID NO: 96 | GSEEDCKVHCVKWWMAYKACAERNKSDTTGQAHCSGQKFDVFK |
| | CLDHCAAP |
| SEQ ID NO: 97 | GSEEDCKVHCVKWWMAGKACAERIKSDTTGQAHCSGQKFDVFK |
| | CLDHCAAP |
| SEQ ID NO: 98 | GSEEDCKVHCVKWWMAGKACAERNKSDTTGQAHCSGQYFDVFK |
| | CLDHCAAP |
| SEQ ID NO: 99 | GSEEDCKVHCVKWWMAGKACAERNKSDTTGQAHCSGQKFDVW |
| | KCLDHCAAP |
| SEQ ID NO: 100 | GSEEDCKVHCVKWWAAYKACAERIKSDTTGQAHCSGQYFDVWK |
| | CLDHCAAP |
| SEQ ID NO: 101 | GSEEDCKVHCVKEWMAYKACAERIKSDTTGQAHCSGQYFDVWK |
| | CLDHCAAP |
| SEQ ID NO: 102 | GSEEDCKVHCVKEWAAGKACAERIKSDTTGQAHCSGQYFDVWKC |
| | LDHCAAP |
| SEQ ID NO: 103 | GSEEDCKVHCVKEWAAYKACAERNKSDTTGQAHCSGQYFDVWK |
| | CLDHCAAP |
| SEQ ID NO: 104 | GSEEDCKVHCVKEWAAYKACAERIKSDTTGQAHCSGQKFDVWKC |
| | LDHCAAP |
| SEQ ID NO: 105 | GSEEDCKVHCVKEWAAYKACAERIKSDTTGQAHCSGQYFDVFKC |
| | LDHCAAP |
| SEQ ID NO: 106 | GSEEDCKVHCVKEWMAGKACAERIKSDTTGQAHCSGQYFDVWK |
| | CLDHCAAP |
| SEQ ID NO: 107 | GSEEDCKVHCVKEWMAYKACAERNKSDTTGQAHCSGQYFDVWK |
| | CLDHCAAP |
| SEQ ID NO: 108 | GSEEDCKVHCVKEWMAYKACAERIKSDTTGQAHCSGQKFDVWK |
| | CLDHCAAP |
| SEQ ID NO: 109 | GSEEDCKVHCVKEWMAYKACAERIKSDTTGQAHCSGQYFDVFKC |
| | LDHCAAP |
| SEQ ID NO: 110 | GSEEDCKVHCVKEWAAGKACAERNKSDTTGQAHCSGQYFDVWK |
| | CLDHCAAP |
| SEQ ID NO: 111 | GSEEDCKVHCVKEWAAGKACAERIKSDTTGQAHCSGQKFDVWKC |
| | LDHCAAP |
| SEQ ID NO: 112 | GSEEDCKVHCVKEWAAGKACAERIKSDTTGQAHCSGQYFDVFKC |
| | LDHCAAP |
| SEQ ID NO: 113 | GSEEDCKVHCVKEWAAYKACAERNKSDTTGQAHCSGQKFDVWK |
| | CLDHCAAP |
| SEQ ID NO: 114 | GSEEDCKVHCVKEWAAYKACAERNKSDTTGQAHCSGQYFDVFKC |
| | LDHCAAP |
| SEQ ID NO: 115 | GSEEDCKVHCVKEWAAYKACAERIKSDTTGQAHCSGQKFDVFKC |
| | LDHCAAP |
| SEQ ID NO: 116 | GSEESCKPQCVKAWLEYQACAERVEKDESGEAHCTGQYFDLWGC |
| | VDKCVAP |
| SEQ ID NO: 117 | GSARTCESQSHRFKGPCVSDTMCASVCRTERFSGGHCRGFRRRCL |
| | CSKHC |
| SEQ ID NO: 118 | GSEERCMPQCVKSLYEYEKCLKRVENDDTGHKHCTGHYFDYWSC |
| | IDKCVAS |
| SEQ ID NO: 436 | GSEEDCRVHCVREWMAGRACAERDRSYTIGRAHCSGQRFDVFRC |
| | LDHCAAP |
| SEQ ID NO: 561 | GSEHDCKVHCVKEWMAGHACAERQKSYTIGRAHCSGQKFDVFKC |
| | LDHCAAP |
| SEQ ID NO: 562 | GSEHDCKVHCVKEWMAGKACAERQKSYTIGRAHCSGQKFDVFKC |
| | LDHCAAP |
| SEQ ID NO: 563 | GSEEDCKVHCVKEWHAGKACAERQKSYTIGRAHCSGQKFDVFKC |
| | LDHCAAP |
| SEQ ID NO: 564 | GSEEDCKVHCVKEWMAGHACAERQKSYTIGRAHCSGQKFDVFKC |
| | LDHCAAP |
| SEQ ID NO: 565 | GSEHDCKVHCVKEWHAGKACAERQKSYTIGRAHCSGQKFDVFKC |
| | LDHCAAP |
| SEQ ID NO: 566 | GSEEDCKVHCVKEWHAGHACAERQKSYTIGRAHCSGQKFDVFKC |
| | LDHCAAP |
| SEQ ID NO: 567 | GSEHDCKVHCVKEWHAGHACAERQKSYTIGRAHCSGQKFDVFKC |
| | LDHCAAP |

[0207] In some embodiments, a PD-L1-binding peptide disclosed herein comprises a sequence of X¹X²X³CX⁴X⁵X⁶CX⁷X⁸X⁹X¹⁰X¹¹X¹²X¹³X¹⁴X¹⁵CX¹⁶X¹⁷X¹⁸X¹⁹X²⁰X²¹X²²X²³X²⁴X²⁵X²⁶X²⁷X²⁸C X²⁹X³⁰X³¹X³²X³³X³⁴X³⁵X³⁶X³⁷CX³⁸X³⁹X⁴⁰ CX⁴¹X⁴²X⁴³ (SEQ ID NO: 358), wherein X¹ can independently be selected from E, M, V, or W; X² can independently be selected from G, E, L, or F; X³ can independently be selected from D, E, or S; X⁴ can independently be selected from K, R, or V; X⁵ can independently be selected from E, Q, S, M, L, or V; X⁶ can independently be selected from D, E, H, K, R, N, Q, S, or Y; X⁷ can independently be selected from D, M, or V; X⁸ can independently be selected from A, K, R, Q, S, or T; X⁹ can independently be selected from A, D, E, H, Q, S, T, M, I, L, V, or W; X¹⁰ can independently be selected from A, E, R, Q, S, T, W, or P; X¹¹ can independently be selected from A, E, K, R, N, Q, T, M, I, L, V, or W; X¹² can independently be selected from G, A, E, K, N, T, or Y; X¹³ can independently be selected from G, A, D, E, H, K, R, N, Q, S, T, M, I, L, V, W, Y, or P; X¹⁴ can independently be selected from D, K, R, N, L, or V; X¹⁵ can independently be selected from G, A, D, T, L, W, or P; X¹⁶ can independently be selected from G, A, E, H, K, N, S, F, or P; X¹⁷ can independently be selected from G, A, D, E, N, or P; X¹⁸ can independently be selected from G, D, H, K, R, N, Q, S, T, V, or Y; X¹⁹ can independently be selected from G, D, E, H, K, N, Q, S, T, M, I, F, W, Y, or P; X²⁰ can independently be selected from G, A, D, E, H, K, R, N, Q, S, Y, or P; X²¹ can independently be selected from G, A, D, H, N, Q, S, V, F, or P; X²² can independently be selected from A, D, H, N, Q, S, T, M, I, V, Y, or P; X²³ can independently be selected from G, A, D, K, R, T, W, or Y; X²⁴ can independently be selected from G, A, E, N, Q, T, I, V, or P; X²⁵ can independently be selected from G, D, N, Q, T, L, V, F, or P; X²⁶ can independently be selected from G, A, E, K, R, N, Q, S, T, I, Y, or P; X²⁷ can independently be selected from A, D, N, or I; X²⁸ can independently be selected from G, D, E, H, N, F, or W; X²⁹ can independently be selected from G, A, E, N, S, Y, or P; X³⁰ can independently be selected from G, M, or L; X³¹ can independently be selected from G, A, D, K, N, Q, or W; X³² can independently be selected from D, E, H, K, N, Q, S, T, L, V, F, Y, or P; X³³ can independently be selected from G, E, Q, or F; X³⁴ can independently be selected from D or K; X³⁵ can independently be selected from G, V, or P; X³⁶ can independently be selected from G, H, R, V, F, W, or P; X³⁷ can independently be selected from A, D, or K; X³⁸ can independently be selected from E, H, Q, L, or F; X³⁹ can independently be selected from D, E, R, S, T, M, L, or F; X⁴⁰ can independently be selected from G, A, D, E, H, K, R, M, L, or P; X⁴¹ can independently be selected from G, A, K, S, I, or L; X⁴² can independently be selected from G, A, D, E, R, Q, T, or F; and X⁴³ can independently be selected from A, H, N, Q, S, F, or P.

[0208] In some embodiments, a binding peptide disclosed herein comprises a sequence of EEDCKVX¹CVX¹X¹X¹X¹X²X³KX¹CX¹EX¹X⁴X¹X¹X¹X¹X¹X¹X¹AX¹CX¹GX¹X⁵FX⁶VFX⁶CLX¹X¹CX¹X¹X¹ (SEQ ID NO: 359), wherein X¹ can independently be selected from any non-cysteine amino acid; X² can independently be selected from M, I, L, or V; X³ can independently be selected from Y, A, H, K, R, N, Q, S, or T; X⁴ can independently be selected from D, E, N, Q, or P; X⁵ can independently be selected from K or P; and X⁶ can independently be selected from D or K.

[0209] A PD-L1-binding peptide may comprise a PD-L1-binding motif that forms part or all of a binding interface with PD-L1. One or more residues of a PD-L1-binding motif may interact with one or more residues of PD-L1 at the binding interface between the PD-L1-binding peptide and PD-L1. In some embodiments, multiple PD-L1-binding motifs may be present in a PD-L1-binding peptide. A PD-L1-binding motif may comprise a sequence of CX¹X²X³CX⁴X⁵X⁶X⁷X⁸X⁹X¹⁰X¹¹X¹²C (SEQ ID NO: 360), wherein X¹ can independently be selected from K, R, or V; X² can independently be selected from E, Q, S, M, L, or V; X³ can independently be selected from D, E, H, K, R, N, Q, S, or Y; X⁴ can independently be selected from D, M, or V; X⁵ can independently be selected from A, K, R, Q, S, or T; X⁶ can independently be selected from A, D, E, H, Q, S, T, M, I, L, V, or W; X⁷ can independently be selected from A, E, R, Q, S, T, W, or P; X⁸ can independently be selected from A, E, K, R, N, Q, T, M, I, L, V, or W; X⁹ can independently be selected from G, A, E, K, N, T, or Y; X¹⁰ can independently be selected from G, A, D, E, H, K, R, N, Q, S, T, M, I, L, V, W, Y, or P; X¹¹ can independently be selected from D, K, R, N, L, or V; and X¹² can independently be selected from G, A, D, T, L, W, or P. In some embodiments, a PD-L1-binding motif may comprise a sequence of CKVX¹CVX¹X¹X¹X¹X²X³KX¹C (SEQ ID NO: 362), wherein X¹ can independently be selected from any non-cysteine amino acid; X² can independently be selected from M, I, L, or V; and X³ can independently be selected from Y, A, H, K, R, N, Q, S, or T. In some embodiments, a PD-L1-binding motif may comprise a sequence of CKVHCVKEWMAGKAC (SEQ ID NO: 364). In some embodiments, a PD-L1-binding motif may comprise at least about 70%, at least about 75%, at least about 80%, at least about 85%, at least about 90%, at least about 95%, at least about 97%, or at least about 99% identity to SEQ ID NO: 364.

[0210] A PD-L1-binding motif may comprise a sequence of X¹X²X³X⁴X⁵X⁶CX⁷X⁸X⁹C (SEQ ID NO: 361), wherein X¹ can independently be selected from D, E, H, K, N, Q, S, T, L, V, F, Y, or P; X² can independently be selected from G, E, Q, or F; X³ can independently be selected from D or K; X⁴ can independently be selected from G, V, or P; X⁵ can independently be selected from G, H, R, V, F, W, or P; X⁶ can independently be selected from A, D, or K; X⁷ can independently be selected from E, H, Q, L, or F; X⁸ can independently be selected from D, E, R, S, T, M, L, or F; and X⁹ can independently be selected from G, A, D, E, H, K, R, M, L, or P. In some embodiments, a PD-L1-binding motif may comprise a sequence of X⁴FX²VFX²CLX³X³C (SEQ ID NO: 363), wherein X¹ can independently be selected from K or P; X² can independently be selected from D or K; and X³ can independently be selected from any non-cysteine amino acid. In some embodiments, a PD-L1-binding motif may comprise a sequence of KFDVFKCLDHC (SEQ ID NO: 365). In some embodiments, a PD-L1-binding motif may comprise at least about 70%, at least about 75%, at least about 80%, at least about 85%, at least about 90%, at least about 95%, at least about 97%, or at least about 99% identity to SEQ ID NO: 365.

[0211] A PD-L1-binding peptide of the present disclosure (e.g., any one of SEQ ID NO: 1-SEQ ID NO: 118, SEQ ID NO: 435, SEQ ID NO: 436, or SEQ ID NO: 554-SEQ ID NO: 567) may comprise one or more secondary structural elements. In some embodiments, a PD-L1-binding peptide may comprise an α-helix, a ß-sheet, a loop, or combinations thereof. A PD-L1-binding peptide (e.g., any one of SEQ ID NO: 1-SEQ ID NO: 56 or SEQ ID NO: 60-SEQ ID NO: 115) may comprise an α-helix comprising amino acid residues, n through n+20, where n corresponds to an amino acid position of a first cysteine residue. For example, a PD-L1-binding peptide of SEQ ID NO: 3 may comprise an α-helix comprising amino acid residues C4 through S24. A PD-L1-binding peptide (e.g., any one of SEQ ID NO: 1-SEQ ID NO: 56 or SEQ ID NO: 60-SEQ ID NO: 115) may comprise an α-helix comprising amino acid residues n+29 through n+44, where n corresponds to an amino acid position of a first cysteine residue. For example, a PD-L1-binding peptide of SEQ ID NO: 3 may comprise an α-helix comprising amino acid residues S33 through A48. A PD-L1-binding peptide (e.g., any one of SEQ ID NO: 1-SEQ ID NO: 56 or SEQ ID NO: 60-SEQ ID NO: 115) may comprise an α-helix comprising amino acid residues n+34 through n+44, where n corresponds to an amino acid position of a first cysteine residue. For example, a PD-L1-binding peptide of SEQ ID NO: 3 may comprise an α-helix comprising amino acid residues D38 through A48. In some embodiments, a PD-L1-binding peptide of the present disclosure can bind to PD-L1 by forming hydrophobic interactions with 154, Y56, R113, M115, or Y123 of PD-L1. For example, residues V9, W12, M13, V39, or F40 of SEQ ID NO: 1 may hydrophobic interactions with PD-L1. In some embodiments, a PD-L1-binding peptide of the present disclosure can form a salt bridge with Q66, A121, and Y123 of PD-L1. For example, residues K5, K16, L43, and D44 of SEQ ID NO: 1 may form salt bridges with PD-L1. In some embodiments, a PD-L1-binding peptide of the present disclosure can bind to PD-L1 in a similar manner to that of natural binding partner PD-1 which uses K78, 1126, L128, A132, 1134, and E136 to interact with the same sites on PD-L1 as K5, L43, V9, W12, F40, and D44, respectively, of SEQ ID NO: 1. In some embodiments, any one of SEQ ID NO: 358-SEQ ID NO: 365 may comprise a portion of a PD-L1-binding peptide that interacts with PD-L1 (e.g., to form hydrophobic interactions or salt bridges). For example, any one of SEQ ID NO: 358-SEQ ID NO: 365 may comprise K5, V9, W12, M13, K16, V39, F40, L43, D44, or combinations thereof, with respect to SEQ ID NO: 1.

[0212] In some embodiments, a PD-L1-binding peptide of the present disclosure can bind to PD-L1 with an affinity that is pH-independent. For example, a PD-L1-binding peptide can bind PD-L1 at an extracellular pH (about pH 7.4) with an affinity that is substantially the same the binding affinity at an endocytic pH (such as about pH 5.5 or about pH 6.5). In some embodiments, a PD-L1-binding peptide can bind PD-L1 at an extracellular pH (about pH 7.4) with an affinity that is lower than the binding affinity at an endocytic pH (such as about pH 5.5 or about pH 6.5). In some embodiments, a PD-L1-binding peptide can bind PD-L1 at an extracellular pH (about pH 7.4) with an affinity that is higher than the binding affinity at an endocytic pH (such as about pH 5.5 or about pH 6.5). In some embodiments, the binding affinity of a PD-L1-binding peptide for PD-L1 at extracellular pH (about pH 7.4) the binding affinity of a PD-L1-binding peptide for PD-L1 at endocytic pH (about pH 5.5) can differ by no more than about 1%, no more than about 2%, no more than about 3%, no more than about 4%, no more than about 5%, no more than about 6%, no more than about 7%, no more than about 8%, no more than about 9%, no more than about 10%, no more than about 12%, no more than about 15%, no more than about 17%, no more than about 20%, no more than about 25%, no more than about 30%, no more than about 35%, no more than about 40%, no more than about 45%, or no more than about 50%. In some embodiments, the affinity of the PD-L1-binding peptide for PD-L1 at pH 7.4 and at pH 5.5 can differ by no more than 5-fold, no more than 10-fold, no more than 15-fold, no more than 20-fold, no more than 25-fold, no more than 30-fold, no more than 40-fold, or no more than 50-fold. In some embodiments, a PD-L1-binding peptide (e.g., any one of SEQ ID NO: 1-SEQ ID NO: 118, SEQ ID NO: 435, SEQ ID NO: 436, or SEQ ID NO: 554-SEQ ID NO: 567) can be modified to remove one or more histidine amino acids in the PD-L1 binding interface, thereby reducing the pH-dependence of the binding affinity of the PD-L1-binding peptide for PD-L1. In some embodiments, a PD-L1-binding peptide (e.g., any one of SEQ ID NO: 1-SEQ ID NO: 118, SEQ ID NO: 435, SEQ ID NO: 436, or SEQ ID NO: 554-SEQ ID NO: 567) can lack histidine amino acids in the PD-L1 binding interface.

[0213] In some embodiments, a PD-L1-binding peptide can bind to PD-L1 with an equilibrium dissociation constant (K_{D}) of not greater than 50 μM, not greater than 5 μM, not greater than 500 nM, not greater than 100 nM, not greater than 40 nM, not greater than 30 nM, not greater than 20 nM, not greater than 10 nM, not greater than 5 nM, not greater than 2 nM, not greater than 1 nM, not greater than 0.5 nM, not greater than 0.4 nM, not greater than 0.3 nM, not greater than 0.25 nM, not greater than 0.2 nM, or not greater than 0.1 nM, for example at extracellular pH (about pH 7.4). In some embodiments, a PD-L1-binding peptide with pH-independent binding can bind to PD-L1 with a dissociation constant (K_{D}) of not greater than 50 μM, not greater than 5 μM, not greater than 500 nM, not greater than 100 nM, not greater than 40 nM, not greater than 30 nM, not greater than 20 nM, not greater than 10 nM, not greater than 5 nM, not greater than 2 nM, not greater than 1 nM, not greater than 0.5 nM, not greater than 0.2 nM, or not greater than 0.1 nM at endosomal pH (about pH 5.5). In some embodiments, the PD-L1-binding peptide can bind to PD-L1 with an affinity that is pH-dependent. For example, the PD-L1-binding molecule can bind to PD-L1 with higher affinity at extracellular pH (about pH 7.4) and with lower affinity at endosomal pH (about pH 5.5), thereby releasing the peptide or peptide complex from PD-L1 upon entry into and acidification of the endosomal compartment.

[0214] A PD-L1-binding peptide of the present disclosure may be cross-reactive with two or more species of PD-L1, or a PD-L1-binding peptide may be selective for one or more species of PD-L1. For example, a PD-L1-binding peptide may be cross-reactive for both human and cynomolgus PD-L1. A PD-L1-binding peptide may be cross-reactive for two species if it binds to both species with an equilibrium dissociation constant (K_{D}) that differs by no more than 1.5-fold, no more than 2-fold, no more than 5-fold, or no more than 10-fold. In some embodiments, a PD-L1-binding peptide may not be cross-reactive with one or more species of PD-L1. For example, a PD-L1-binding peptide may bind human PD-L1 with an equilibrium dissociation constant (K_{D}) of not greater than 100 nM, not greater than 50 nM, not greater than 1 nM, not greater than 500 pM, not greater than 300 pM, not greater than 250 pM, or not greater than 200 pM but may bind murine PD-L1 with an equilibrium dissociation constant (K_{D}) that is at least 10-fold, 50-fold, or 100-fold greater.

### Sequence Identity and Homology

[0215] Percent (%) sequence identity or homology is determined by conventional methods. (See e.g., Altschul et al. (1986), Bull. Math. Bio. 48:603 (1986), and Henikoff and Henikoff (1992), Proc. Natl. Acad. Sci. USA 89:10915). Briefly, two amino acid sequences can be aligned to optimize the alignment scores using a gap opening penalty of 10, a gap extension penalty of 1, and the “BLOSUM62” scoring matrix of Henikoff and Henikoff (Id.). The sequence identity or homology is then calculated as: ([Total number of identical matches]/[length of the longer sequence plus the number of gaps introduced into the longer sequence in order to align the two sequences])(100).

[0216] Various methods and software programs can be used to determine the homology between two or more peptides, such as NCBI BLAST, Clustal W, MAFFT, Clustal Omega, AlignMe, Praline, or another suitable method or algorithm. Pairwise sequence alignment can be used to identify regions of similarity that can indicate functional, structural and/or evolutionary relationships between two biological sequences (e.g., amino acid or nucleic acid sequences). In addition, multiple sequence alignment (MSA) is the alignment of three or more biological sequences. From the output of MSA applications, homology can be inferred and the evolutionary relationship between the sequences assessed. As used herein, “sequence homology” and “sequence identity” and “percent (%) sequence identity” and “percent (%) sequence homology” are used interchangeably to mean the sequence relatedness or variation, as appropriate, to a reference polynucleotide or amino acid sequence.

[0217] Additionally, there are several established algorithms available to align two amino acid sequences. For example, the “FASTA” similarity search algorithm of Pearson and Lipman can be a suitable protein alignment method for examining the level of sequence identity or homology shared by an amino acid sequence of a peptide disclosed herein and the amino acid sequence of a peptide variant. The FASTA algorithm is described, for example, by Pearson and Lipman, Proc. Nat'l Acad. Sci. USA 85:2444 (1988), and by Pearson, Meth. Enzymol. 183:63 (1990). Briefly, FASTA first characterizes sequence similarity by identifying regions shared by the query sequence (e.g., SEQ ID NO: 1) and a test sequence that has either the highest density of identities (if the ktup variable is 1) or pairs of identities (if ktup=2), without considering conservative amino acid substitutions, insertions, or deletions. The ten regions with the highest density of identities are then rescored by comparing the similarity of all paired amino acids using an amino acid substitution matrix, and the ends of the regions are “trimmed” to include only those residues that contribute to the highest score. If there are several regions with scores greater than the “cutoff” value (calculated by a predetermined formula based upon the length of the sequence and the ktup value), then the trimmed initial regions are examined to determine whether the regions can be joined to form an approximate alignment with gaps. Finally, the highest scoring regions of the two amino acid sequences are aligned using a modification of the Needleman-Wunsch-Sellers algorithm (Needleman and Wunsch, J. Mol. Biol. 48:444 (1970); Sellers, Siam J. Appl. Math. 26:787 (1974)), which allows for amino acid insertions and deletions. For example, illustrative parameters for FASTA analysis are: ktup=1, gap opening penalty=10, gap extension penalty=1, and substitution matrix=BLOSUM62. These parameters can be introduced into a FASTA program by modifying the scoring matrix file (“SMATRIX”), as explained in Appendix 2 of Pearson, Meth. Enzymol. 183:63 (1990).

[0218] FASTA can also be used to determine the sequence identity or homology of nucleic acid sequences or molecules using a ratio as disclosed above. For nucleic acid sequence comparisons, the ktup value can range between one to six, preferably from three to six, most preferably three, with other parameters set as described herein.

[0219] Some examples of common amino acids that are a “conservative amino acid substitution” are illustrated by a substitution among amino acids within each of the following groups: (1) glycine, alanine, valine, leucine, and isoleucine, (2) phenylalanine, tyrosine, and tryptophan, (3) serine and threonine, (4) aspartate and glutamate, (5) glutamine and asparagine, and (6) lysine, arginine and histidine. The BLOSUM62 table is an amino acid substitution matrix derived from about 2,000 local multiple alignments of protein sequence segments, representing highly conserved regions of more than 500 groups of related proteins (Henikoff and Henikoff, Proc. Nat'l Acad. Sci. USA 89:10915 (1992)). Accordingly, the BLOSUM62 substitution frequencies can be used to define conservative amino acid substitutions that can be introduced into the amino acid sequences of the present invention. Although it is possible to design amino acid substitutions based solely upon chemical properties (as discussed above), the language “conservative amino acid substitution” preferably refers to a substitution represented by a BLOSUM62 value of greater than −1. For example, an amino acid substitution is conservative if the substitution is characterized by a BLOSUM62 value of 0, 1, 2, or 3. According to this system, preferred conservative amino acid substitutions are characterized by a BLOSUM62 value of at least 1 (e.g., 1, 2 or 3), while more preferred conservative amino acid substitutions are characterized by a BLOSUM62 value of at least 2 (e.g., 2 or 3).

[0220] Determination of amino acid residues that are within regions or domains that are critical to maintaining structural integrity can be determined. Within these regions one can determine specific residues that can be more or less tolerant of change and maintain the overall tertiary structure of the molecule. Methods for analyzing sequence structure include, but are not limited to, alignment of multiple sequences with high amino acid or nucleotide identity or homology and computer analysis using available software (e.g., the Insight II® viewer and homology modeling tools; MSI, San Diego, Calif.), secondary structure propensities, binary patterns, complementary packing and buried polar interactions (Barton, G. J., Current Opin. Struct. Biol. 5:372-6 (1995) and Cordes, M. H. et al., Current Opin. Struct. Biol. 6:3-10 (1996)). In general, when designing modifications to molecules or identifying specific fragments, determination of structure can typically be accompanied by evaluating activity of modified molecules.

### Peptide Active Agent Complexes

[0221] In some embodiments, PD-L1-binding CDPs, such as those described in TABLE 1, including engineered, non-naturally occurring CDPs and those found in nature, can be conjugated to, linked to, or fused to an additional active agent to selectively deliver the active agent to a PD-L1 positive cell. The cell can be a cancer cell, an immune cell, a pancreatic beta cell, or any combination thereof. The cell can be any cell that expresses PD-L1. An engineered peptide can be a peptide that is non-naturally occurring, artificial, synthetic, designed, or recombinantly expressed. In some embodiments, a PD-L1-binding peptide complex comprising a PD-L1-binding peptide (e.g., a PD-L1-binding bispecific immune cell engager or a PD-L1-binding chimeric antigen receptor), enables PD-L1-mediated delivery of an additional active agent (e.g., a therapeutic agent, a detectable agent, or an immune cell) to a target cell. The target cell (e.g., a PD-L1 positive target cell) may be associated with a disease or condition. In some embodiments, delivering the active agent to the target cell may treat (e.g., prevent, reduce, eliminate, diagnose, or alleviate symptoms of) the disease or condition. In some cases, the target cell is a cancer cell. Cancers can include melanoma, non-small cell lung cancer, small cell lung cancer, renal cancer, esophageal cancer, oral cancer, hepatocellular cancer, ovarian cancer, cervical cancer, colorectal cancer, lymphoma, bladder cancer, liver cancer, gastric cancer, breast cancer, pancreatic cancer, prostate cancer, Merkel cell carcinoma, mesothelioma, brain cancer, metastatic brain cancer, primary brain cancer, glioblastoma, or a PD-L1-overexpressing cancer. In some cases, PD-L1-binding peptides or peptide complexes and are capable of crossing the blood brain barrier to deliver PD-L1-binding peptides or other active agents to target cells in the central nervous system.

[0222] A PD-L1-binding peptide of the present disclosure may be linked, fused, conjugated, or otherwise complexed with an additional active agent to form a PD-L1-binding peptide complex. In some embodiments, the PD-L1-binding peptide and the additional active agent may be complexed via a linker (e.g., a peptide linker or a small molecule linker). The activity (e.g., binding, inhibitory, or activating activity) of both the PD-L1-binding peptide and the additional active agent may be retained upon complex formation. In some embodiments, an appropriate linker is selected such that activities are retained. An active agent may be any agent capable of performing a function. Such functions may include binding, inhibition, activation, inactivation, recruitment, signal generation, synthesis, destruction, or combinations thereof. In some embodiments, an active agent may be a therapeutic agent (e.g., a therapeutic small molecule or therapeutic peptide) or a detectable agent (e.g., a fluorophore or radioisotope).

[0223] The active agent may be complexed with the PD-L1 binding peptide such that it does not disrupt binding with PD-L1. In some embodiments, a peptide active agent complex may bind to PD-L1 with an equilibrium dissociation constant (K_{D}) of not greater than 100 nM, not greater than 50 nM, not greater than 30 nM, not greater than 20 nM, not greater than 1 nM, not greater than 500 pM, not greater than 300 pM, not greater than 250 pM, or not greater than 200 pM.

### Peptide Therapeutic Agent Complexes

[0224] A PD-L1-binding peptide of the present disclosure (e.g., any one of SEQ ID NO: 1-SEQ ID NO: 118, SEQ ID NO: 435, SEQ ID NO: 436, or SEQ ID NO: 554-SEQ ID NO: 567) may be complexed with a therapeutic agent to form a peptide therapeutic agent complex. The therapeutic agent of the peptide complex may perform a therapeutic function upon delivery to a cell (e.g., a PD-L1 positive cell). Therapeutic functions may include activation or inhibition of a target (e.g., a target enzyme), recruitment of an additional component to the cell, or killing the cell (e.g., a PD-L1 positive cancer cell). Examples of therapeutic agents that may be complexed with a PD-L1-binding peptide include anti-cancer agents, chemotherapeutic agents, radiotherapy agents, anti-inflammatory agents, proinflammatory cytokines, oligonucleotides, or combinations thereof. In some embodiments, an active agent (e.g., an Fc domain or globular protein) may function as a steric blocker. For example, an Fc domain linked to a PD-L1-binding peptide may enhance disruption of PD-1 binding to PD-L1 by the PD-L1-binding peptide by sterically blocking access to PD-L1. In some embodiments, a PD-L1-binding peptide may be complexed with an oncolytic viral vector to deliver the viral vector to a PD-L1 positive cell.

[0225] Chemotherapeutic or anti-cancer agents may function by killing or inhibiting proliferation of a target cancer cell (e.g., a PD-L1 positive cancer cell). Examples of chemotherapeutics or anti-cancer agents that may be complexed with a PD-L1-binding peptide of the present disclosure include antineoplastic agents, cytotoxic agents, tyrosine kinase inhibitors, mTOR inhibitors, retinoids, microtubule polymerization inhibitors, pyrrolobenzodiazepine dimers, or anti-cancer antibodies. Proinflammatory cytokines may function by stimulating an immune response against a target (e.g., a PD-L1 positive cancer cell). Examples of proinflammatory cytokines that may be complexed with a PD-L1-binding peptide of the present disclosure include TNFα, IL-2, IL-6, IL-12, IL-15, IL-21, or IFNγ. Anti-inflammatory agents may function by inhibiting an inflammatory response in or around the target (e.g., by inhibiting a cyclooxygenase enzyme or stimulating a glucocorticoid receptor). Examples of anti-inflammatory agents that may be complexed with a PD-L1-binding peptide of the present disclosure include anti-inflammatory cytokines, steroids, glucocorticoids, corticosteroids, cytokine inhibitors, RORgamma inhibitors, JAK inhibitors, tyroskine kinase inhibitors, or nonsteroidal anti-inflammatory drugs (NSAIDs).

[0226] In some embodiments, an active agent is an immunotherapeutic agent, an immuno-oncology agent, a CTLA-4 targeting agent, a PD-1 targeting agent, a PD-L1 targeting agent, an IL15 agent, a fused IL-15/IL-15Ra complex agent, an IFNgamma agent, an anti-CD3 agent, an ion channel modulator, an auristatin, MMAE, a maytansinoid, DM1, DM4, doxorubicin, a calicheamicin, a platinum compound, cisplatin, a taxane, paclitaxel, SN-38, a BACE inhibitor, a Bcl-xL inhibitor, WEHI-539, venetoclax, ABT-199, navitoclax, AT-101, obatoclax, a pyrrolobenzodiazepine or pyrrolobenzodiazepine dimer, a dolastatin, an immuno-oncology agent, an agent that targets an immune cell, (e.g., targets GITR, 4-1BB, CD27, TIGIT, LAG3, TCR, CD40L, OX40, PD-1, CTLA-4, CD28), or an agent that targets a tumor cell (e.g., targets GITRL, 4-1BBL, CD17, CD156/CD112/CD113, MHC11, CD40, OX40L, PD-L1/L2, CD80/86).

[0227] In some embodiments, PD-L1-binding peptides can direct the active agent (e.g., a target-binding nucleotide, small molecule, peptide, or protein active agent) into the cell. In further embodiments, PD-L1-binding peptides can direct the active agent into the nucleus. In some embodiments, the active agent has intrinsic tumor-homing properties, or the active agent can be engineering to have tumor-homing properties. In some embodiments, 1, 2, 3, 4, 5, 6, 7, 8, 9, or 10 active agents can be linked to a peptide or nucleotide. Multiple active agents (e.g., multiple target-binding nucleotides) can be attached by methods such as conjugating to multiple lysine residues and/or the N-terminus, or by linking the multiple active agents to a scaffold, such as a polymer or dendrimer and then attaching that agent-scaffold to the peptide (such as described in Yurkovetskiy, A. V., Cancer Res 75(16): 3365-72 (2015)). Examples of active agents include but are not limited to: a peptide, an oligopeptide, a polypeptide, a peptidomimetic, a polynucleotide, a polyribonucleotide, a DNA, a cDNA, a ssDNA, a RNA, a dsRNA, a micro RNA, an oligonucleotide, antisense RNA, complementary RNA, inhibitory RNA, interfering RNA, nuclear RNA, antisense oligonucleotide (ASO), microRNA (miRNA), an oligonucleotide complementary to a natural antisense transcripts (NATs) sequences, siRNA, snRNA, aptamer, gapmer, anti-miR, splice blocker ASO, or U1 Adapter an antibody, a single chain variable fragment (scFv), an antibody fragment, an aptamer, a cytokine, an interferon, a hormone, an enzyme, a growth factor, a checkpoint inhibitor, a PD-1 inhibitor, a PD-L1 inhibitor, a CD47 inhibitor, a CTLA4 inhibitor, a CD antigen, a chemokine, an ion channel inhibitor, an ion channel activator, a G-protein coupled receptor inhibitor, a G-protein coupled receptor activator, a chemical agent, a radiosensitizer, a radioprotectant, a radionuclide, a therapeutic small molecule, a steroid, a corticosteroid, an anti-inflammatory agent, an immune modulator, an immuno-oncology agent, a complement fixing peptide or protein, a tumor necrosis factor inhibitor, a tumor necrosis factor activator, a tumor necrosis factor receptor family agonist, a tumor necrosis receptor antagonist, a Tim-3 inhibitor, a protease inhibitor, an amino sugar, a chemotherapeutic, a cytotoxic molecule, a toxin, a tyrosine kinase inhibitor, an anti-infective agent, an antibiotic, an anti-viral agent, an anti-fungal agent, an aminoglycoside, a nonsteroidal anti-inflammatory drug (NSAID), a statin, a nanoparticle, a liposome, a polymer, a biopolymer, a polysaccharide, a proteoglycan, a glycosaminoglycan, polyethylene glycol, a lipid, a dendrimer, a fatty acid, or an Fc region, or an active fragment or a modification thereof.

[0228] Only a small fraction of currently available drug molecules have applicability in CNS diseases due to their poor BBB penetration capabilities. About 98% of small molecule drugs do not or do only to a very limited degree cross the BBB. In addition, nearly 100% of macromolecular drug molecules (e.g., antibodies) do not exhibit significant BBB penetration capabilities. (See e.g., Mikitsh et al. Pathways for Small Molecule Delivery to the Central Nervous System Across the Blood-Brain Barrier, Perspect Medicin Chem. 2014; 6: 11-24). PD-L1-binding antibodies may not be able to cross the BBB at therapeutically sufficient levels. PD-L1 binding peptides of this disclosure may be able to cross the BBB by virtue of CDP properties, PD-L1-binding properties, or other properties. PD-L1 binding peptides of this disclosure may also be complexed with other agents, such as a transferrin-receptor (TfR) binding agent, to enable the complex to cross the BBB. PD-L1-expressing cells, such as cancer cells in the brain (e.g., from primary or metastatic cancers) may be beneficially targeted by administering PD-L1-binding molecules that can cross the BBB. Thus, the PD-L1 binding peptides of this disclosure may be administered for therapeutic utility in the CNS, such as to block PD-L1 in the brain, to deliver active agents to the brain (e.g., T-cell binders or oligonucleotides). The PD-L1 binding peptides of this disclosure may also be complexed with a TfR-binding peptide (e.g., SEQ ID NO: 350) in order to deliver the PD-L1 binding peptides of this disclosure across the BBB to the CNS. Brain tumors that can be treated or prevented using conjugates or fusion molecules comprising one or more PD-L1-binding peptides of the present disclosure can include glioblastoma, astrocytoma, glioma, medulloblastoma, ependymoma, choroid plexus carcinoma, midline glioma, metastatic cancer including but not limited to metastatic melanoma, breast cancer, and lung cancer, and diffuse intrinsic pontine glioma.

[0229] Active agents that may be used in combination with the PD-L1-binding peptides described herein include cytotoxic molecules. For example, cytotoxic molecules that can be used include auristatins, MMAE, MMAF, dolostatin, auristatin F, monomethylaurstatin D, DM1, DM4, maytansinoids, maytansine, calicheamicins, N-acetyl-γ-calicheamicin, pyrrolobenzodiazepines, PBD dimers, doxorubicin, vinca alkaloids (4-deacetylvinblastine), duocarmycins, cyclic octapeptide analogs of mushroom amatoxins, epothilones, and anthracylines, CC-1065, taxanes, paclitaxel, cabazitaxel, docetaxel, SN-38, irinotecan, vincristine, vinblastine, platinum compounds, cisplatin, methotrexate, BACE (beta-secretase 1) inhibitors such as verubecestat, chlorambucil, mitomycin C. Additional examples of active agents are described in McCombs, J. R., AAPS J, 17(2): 339-51 (2015), Ducry, L., Antibody Drug Conjugates (2013), and Singh, S. K., Pharm Res. 32(11): 3541-3571 (2015). Additional examples of therapeutic payloads which therapeutic efficacy can be significantly improved when used in combination with the compositions and methods of the present disclosure include Carmustine, Cisplatin, Cyclophosphamide, Etoposide, Irinotecan, Lomustine, Procarbazine, Temozolomide, Vincristine, and Bevacizumab. Additional examples of therapeutic payloads are compounds that have therapeutic benefit in neurodegenerative diseases such as BACE inhibitors or auto-immunity diseases.

### Peptide Detectable Agent and Peptide Radiotherapeutic Agent Complexes

[0230] A PD-L1-binding peptide (e.g., any one of SEQ ID NO: 1-SEQ ID NO: 118, SEQ ID NO: 435, SEQ ID NO: 436, or SEQ ID NO: 554-SEQ ID NO: 567) or peptide complex of the present disclosure may be complexed with a detectable agent or radiotherapeutic agent to form a peptide detectable agent complex or peptide radiotherapeutic agent complex. The peptide or peptide complex (e.g., a PD-L1-binding peptide complex) of the present disclosure may be conjugated, linked, or fused to a detectable agent or a radiotherapeutic agent. In some embodiments, a detectable agent or a therapeutic agent may be complexed with a PD-L1-binding peptide in combination with an additional active agent (e.g., a therapeutic agent, an oligonucleotide, or a therapeutic oligonucleotide). For example, a detectable agent may be conjugated to a PD-L1-binding peptide oligonucleotide complex. In some embodiments, the detectable agent or radiotherapeutic agent may be directly or indirectly linked to a PD-L1-binding peptide. In some embodiments, the detectable agent or radiotherapeutic agent may be directly or indirectly linked to an active agent of a PD-L1-binding peptide complex (e.g., an oligonucleotide of a PD-L1-binding peptide oligonucleotide complex). A peptide complex comprising a detectable agent may be referred to as a detectable agent peptide conjugate or a detectable agent peptide complex. A peptide (e.g., a PD-L1-binding peptide) can be conjugated to, linked to, or fused to an agent used in imaging, research, therapeutics, theranostics, pharmaceuticals, chemotherapy, chelation therapy, targeted drug delivery, and radiotherapy. In some embodiments, a peptide is conjugated to, linked to, or fused with detectable agents, such as a fluorophore, a near-infrared dye, a contrast agent, a nanoparticle, a metal-containing nanoparticle, a metal chelate, an X-ray contrast agent, a PET agent, a metal, a radioisotope, a dye, radionuclide chelator, or another suitable material that can be used in imaging.

[0231] In some embodiments, 1, 2, 3, 4, 5, 6, 7, 8, 9, or 10 detectable agents can be linked to a peptide or nucleotide. Non-limiting examples of radioisotopes include alpha emitters, beta emitters, positron emitters, and gamma emitters. In some embodiments, the metal or radioisotope is selected from the group consisting of actinium, americium, bismuth, cadmium, cesium, cobalt, europium, gadolinium, iridium, lead, lutetium, manganese, palladium, polonium, radium, ruthenium, samarium, strontium, technetium, thallium, and yttrium. In some embodiments, the metal is actinium, bismuth, lead, radium, strontium, samarium, or yttrium. In some embodiments, the radioisotope is actinium-225 or lead-212. In some embodiments, the near-infrared dyes are not easily quenched by biological tissues and fluids. In some embodiments, the fluorophore is a fluorescent agent emitting electromagnetic radiation at a wavelength between 650 nm and 4000 nm, such emissions being used to detect such agent. Non-limiting examples of fluorescent dyes that could be used as a conjugating molecule in the present disclosure include DyLight-680, DyLight-750, VivoTag-750, DyLight-800, IRDye-800, VivoTag-680, Cy5.5, or indocyanine green (ICG). In some embodiments, near infrared dyes often include cyanine dyes (e.g., Cy7, Cy5.5, and Cy5). Additional non-limiting examples of fluorescent dyes for use as a conjugating molecule in the present disclosure include acradine orange or yellow, Alexa Fluors (e.g., Alexa Fluor 790, 750, 700, 680, 660, and 647) and any derivative thereof, 7-actinomycin D, 8-anilinonaphthalene-1-sulfonic acid, ATTO dye and any derivative thereof, auramine-rhodamine stain and any derivative thereof, bensantrhone, bimane, 9-10-bis(phenylethynyl)anthracene, 5,12-bis(phenylethynyl)naththacene, bisbenzimide, brainbow, calcein, carbodyfluorescein and any derivative thereof, 1-chloro-9,10-bis(phenylethynyl)anthracene and any derivative thereof, DAPI, DiOC6, DyLight Fluors and any derivative thereof, epicocconone, ethidium bromide, FlAsH-EDT2, Fluo dye and any derivative thereof, FluoProbe and any derivative thereof, Fluorescein and any derivative thereof, Fura and any derivative thereof, GelGreen and any derivative thereof, GelRed and any derivative thereof, fluorescent proteins and any derivative thereof, m isoform proteins and any derivative thereof such as for example mCherry, hetamethine dye and any derivative thereof, hoeschst stain, iminocoumarin, Indian yellow, indo-1 and any derivative thereof, laurdan, lucifer yellow and any derivative thereof, luciferin and any derivative thereof, luciferase and any derivative thereof, mercocyanine and any derivative thereof, nile dyes and any derivative thereof, perylene, phloxine, phyco dye and any derivative thereof, propium iodide, pyranine, rhodamine and any derivative thereof, ribogreen, RoGFP, rubrene, stilbene and any derivative thereof, sulforhodamine and any derivative thereof, SYBR and any derivative thereof, synapto-pHluorin, tetraphenyl butadiene, tetrasodium tris, Texas Red, Titan Yellow, TSQ, umbelliferone, violanthrone, yellow fluroescent protein and YOYO-1. Other Suitable fluorescent dyes include, but are not limited to, fluorescein and fluorescein dyes (e.g., fluorescein isothiocyanine or FITC, naphthofluorescein, 4′, 5′-dichloro-2′,7′-dimethoxyfluorescein, 6-carboxyfluorescein or FAM, etc.), carbocyanine, merocyanine, styryl dyes, oxonol dyes, phycoerythrin, erythrosin, eosin, rhodamine dyes (e.g., carboxytetramethyl-rhodamine or TAMRA, carboxyrhodamine 6G, carboxy-X-rhodamine (ROX), lissamine rhodamine B, rhodamine 6G, rhodamine Green, rhodamine Red, tetramethylrhodamine (TMR), etc.), coumarin and coumarin dyes (e.g., methoxycoumarin, dialkylaminocoumarin, hydroxycoumarin, aminomethylcoumarin (AMCA), etc.), Oregon Green Dyes (e.g., Oregon Green 488, Oregon Green 500, Oregon Green 514, etc.), Texas Red, Texas Red-X, SPECTRUM RED, SPECTRUM GREEN, cyanine dyes (e.g., CY-3, Cy-5, CY-3.5, CY-5.5, etc.), ALEXA FLUOR dyes (e.g., ALEXA FLUOR 350, ALEXA FLUOR 488, ALEXA FLUOR 532, ALEXA FLUOR 546, ALEXA FLUOR 568, ALEXA FLUOR 594, ALEXA FLUOR 633, ALEXA FLUOR 660, ALEXA FLUOR 680, etc.), BODIPY dyes (e.g., BODIPY FL, BODIPY R6G, BODIPY TMR, BODIPY TR, BODIPY 530/550, BODIPY 558/568, BODIPY 564/570, BODIPY 576/589, BODIPY 581/591, BODIPY 630/650, BODIPY 650/665, etc.), IRDyes (e.g., IRD40, IRD 700, IRD 800, etc.), and the like. Additional suitable detectable agents are described in PCT/US14/56177.

[0232] In some embodiments, a peptide of the present disclosure (e.g., PD-L1-binding peptide) may further comprise or be complexed with a radioisotope, radiochelator, radiosensitizer, or photosensitizer. In some embodiments, the radioisotope, radiochelator, radiosensitizer, or photosensitizer may be incorporated into, or directly or indirectly linked to the PD-L1-binding peptide. In some embodiments, a radioisotope, radiochelator, radiosensitizer, or photosensitizer. In some embodiments, the radioisotope, radiochelator, radiosensitizer, or photosensitizer may be incorporated into or complexed with a PD-L1-binding peptide complex comprising an additional active agent (e.g., a therapeutic agent, an oligonucleotide, or a therapeutic oligonucleotide). For example, a radioisotope, radiochelator, radiosensitizer, or photosensitizer may be incorporated into, or directly or indirectly linked to an oligonucleotide of PD-L1-binding peptide oligonucleotide complex. The radioisotope, radiochelator, radiosensitizer, photosensitizer may function as a detectable agent, a therapeutic agent, or both. Non-limiting examples of radioisotopes include alpha emitters, beta emitters, positron emitters, and gamma emitters. In some embodiments, the metal or radioisotope is selected from the group consisting of actinium, americium, bismuth, cadmium, cesium, cobalt, europium, gadolinium, iridium, lead, lutetium, manganese, palladium, polonium, radium, ruthenium, samarium, strontium, technetium, thallium, and yttrium. In some embodiments, the metal is actinium, bismuth, lead, radium, strontium, samarium, or yttrium. In some embodiments, the radioisotope is actinium-225 or lead-212. Additionally, the following radionuclides can be used for diagnosis and/or therapy: carbon (e.g., ¹¹C or ¹⁴C), nitrogen (e.g., ¹³N), fluorine (e.g., ¹⁸F), gallium (e.g., ⁶⁷Ga or ⁶⁸Ga), copper (e.g., ⁶⁴Cu or ⁶⁷Cu), zirconium (e.g., ⁸⁹Zr), lutetium (e.g., ¹⁷⁷Lu). In some embodiments, the radioisotope is indium-111, technetium-99m, yttrium-90, iodine-131, iodine-123, or astatine-211.

[0233] A PD-L1-binding peptide or an active agent of a PD-L1-binding peptide complex can be conjugated to, linked to, or fused to a radiosensitizer or photosensitizer. Examples of radiosensitizers include but are not limited to: ABT-263, ABT-199, WEHI-539, paclitaxel, carboplatin, cisplatin, oxaliplatin, gemcitabine, etanidazole, misonidazole, tirapazamine, and nucleic acid base derivatives (e.g., halogenated purines or pyrimidines, such as 5-fluorodeoxyuridine). Examples of photosensitizers can include but are not limited to: fluorescent molecules or beads that generate heat when illuminated, nanoparticles, porphyrins and porphyrin derivatives (e.g., chlorins, bacteriochlorins, isobacteriochlorins, phthalocyanines, and naphthalocyanines), metalloporphyrins, metallophthalocyanines, angelicins, chalcogenapyrrillium dyes, chlorophylls, coumarins, flavins and related compounds such as alloxazine and riboflavin, fullerenes, pheophorbides, pyropheophorbides, cyanines (e.g., merocyanine 540), pheophytins, sapphyrins, texaphyrins, purpurins, porphycenes, phenothiaziniums, methylene blue derivatives, naphthalimides, nile blue derivatives, quinones, perylenequinones (e.g., hypericins, hypocrellins, and cercosporins), psoralens, quinones, retinoids, rhodamines, thiophenes, verdins, xanthene dyes (e.g., eosins, erythrosins, rose bengals), dimeric and oligomeric forms of porphyrins, and prodrugs such as 5-aminolevulinic acid. Advantageously, this approach can allow for highly specific targeting of diseased cells (e.g., cancer cells) using both a therapeutic agent (e.g., drug) and electromagnetic energy (e.g., radiation or light) concurrently. In some embodiments, the peptide is conjugated to, linked to, fused with, or covalently or non-covalently linked to the agent, e.g., directly or via a linker. Exemplary linkers suitable for use with the embodiments herein are discussed in further detail below.

[0234] A PD-L1-binding peptide or an active agent of a PD-L1-binding peptide complex can be conjugated to, linked to, or fused to a radionuclide via chelator. In some embodiments, the radionuclide may be linked to the peptide of the peptide oligonucleotide complex or the nucleotide of the peptide oligonucleotide complex via the chelator. In some aspects of the present disclosure, the radionuclide is attached to a peptide oligonucleotide complex as described herein using a chelator. Exemplary chelator moieties can include 2,2′,2″-(3-(4-(3-(1-(4-(1,2,4,5-tetrazin-3-yl)phenyl)-1-oxo-5,8,11,14,17,20,23-heptaoxa-2-azapentacosan-25-yl)thioureido)benzyl)-1,4,7-triazonane-2,5,8-triyl)triacetic acid; 2,2′,2″-(3-(4-(3-(1-(4-(1,2,4,5-tetrazin-3-yl)phenyl)-1-oxo-5,8,11,14,17,20,23,26,29,32,35-undecaoxa-2-azaheptatriacontain-37-yl)thioureido)benzyl)-1,4,7-triazonane-2,5,8-triyl)triacetic acid; 2,2′-(7-(4-(3-(1-(4-(1,2,4,5-tetrazin-3-yl)phenyl)-1-oxo-5,8,11,14,17,20,23,26,29,32,35-undecaoxa-2-azaheptatriacontain-37-yl)thioureido)benzyl)-1,4,7-triazonane-1,4-diyl)diacetic acid; 2,2′,2″-(3-(4-(3-(1-(4-(1,2,4,5-tetrazin-3-yl)phenyl)-3,7-dioxo-11,14,17,20,23,26,29-heptaoxa-2,8-diazahentriacontain-31-yl)thioureido)benzyl)-1,4,7-triazonane-2,5,8-triyl)triacetic acid; 2,2′,2″-(3-(4-(3-(1-(4-(1,2,4,5-tetrazin-3-yl)phenyl)-3,7-dioxo-11,14,17,20,23,26,29,32,35,38,41-undecaoxa-2,8-diazatritetracontain-43-yl)thioureido)benzyl)-1,4,7-triazonane-2,5,8-triyl)triacetic acid; 2,2′,2″-(3-(4-(3-(25,28-dioxo-28-((6-(6-(pyridin-2-yl)-1,2,4,5-tetrazin-3-yl)pyridin-3-yl)amino)-3,6,9,12,15,18,21-heptaoxa-24-azaoctacosyl)thioureido)benzyl)-1,4,7-triazonane-2,5,8-triyl)triacetic acid; 2,2′,2″-(3-(4-(3-(37,40-dioxo-40-((6-(6-(pyridin-2-yl)-1,2,4,5-tetrazin-3-yl)pyridin-3-yl)amino)-3,6,9,12,15,18,21,24,27,30,33-undecaoxa-36-azatetracontyl)thioureido)benzyl)-1,4,7-triazonane-2,5,8-triyl)triacetic acid; 2,2′,2″-(3-(4-(1-(4-(6-methyl-1,2,4,5-tetrazin-3-yl)phenyl)-3-oxo-6,9,12,15,18,21,24-heptaoxa-2-azaheptacosan-27-amido)benzyl)-1,4,7-triazonane-2,5,8-triyl)triacetic acid; 2,2′,2″-(2-(4-(1-(4-(6-methyl-1,2,4,5-tetrazin-3-yl)phenoxy)-3,6,9,12,15,18,21,24,27,30,33-undecaoxahexatriacontain-36-amido)benzyl)-1,4,7-triazonane-1,4,7-triyl)triacetic acid; 2,2′,2″-(3-(4-(3-(5-amino-6-((4-(6-methyl-1,2,4,5-tetrazin-3-yl)benzyl)amino)-6-oxohexyl)thioureido)benzyl)-1,4,7-triazonane-2,5,8-triyl)triacetic acid; 2,2′-(7-(4-(3-(5-amino-6-((4-6-methyl-1,2,4,5-tetrazin-3-yl)benzyl)amino)-6-oxohexyl)thioureido)benzyl)-1,4,7-triazonane-1,4-diyl)diacetic acid; 2,2′,2″-(3-(4-(3-(5-amino-6-((5-amino-6-((4-(6-methyl-1,2,4,5-tetrazin-3-yl)benzyl)amino)-6-oxohexyl)amino)-6-oxohexyl)thioureido)benzyl)-1,4,7-triazonane-2,5,8-triyl)triacetic acid; and 2,2′,2″-(3-(4-(3-(5-amino-6-((5-amino-6-((5-amino-6-((4-(6-methyl-1,2,4,5-tetrazin-3-yl)benzyl)amino)-6-oxohexyl)amino)-6-oxohexyl)amino)-6-oxohexyl)thioureido)benzyl)-1,4,7-triazonane-2,5,8-triyl)triacetic acid.

### Bispecific Immune Cell Engagers (BiICEs)

[0235] In some embodiments, an active agent of the present disclosure may be an additional binding moiety (e.g., an immune cell binding moiety). A PD-L1-binding peptide of the present disclosure (e.g., any one of SEQ ID NO: 1-SEQ ID NO: 118, SEQ ID NO: 435, SEQ ID NO: 436, or SEQ ID NO: 554-SEQ ID NO: 567) may be complexed with one or more additional binding moieties to form a bispecific or multi-specific molecule. A bispecific or multi-specific molecule may bind two or more target molecules (e.g., PD-L1 and one or more additional target molecules). An example of a bispecific molecule includes a bispecific immune cell engager (BiICE) comprising a PD-L1-binding peptide (e.g., any one of SEQ ID NO: 1-SEQ ID NO: 118, SEQ ID NO: 435, SEQ ID NO: 436, or SEQ ID NO: 554-SEQ ID NO: 567) and an immune cell targeting agent (e.g., an immune cell targeting antibody or antibody fragment, or an immune cell targeting CDP, peptide, or peptide fragment). The immune cell targeting agent may bind to a molecule on the surface of an immune cell. For example, the immune cell targeting agent may bind to CD3, 4-1BB, CD28, CD137, CD89, CD16, CD25, CD13, CD29, CD44, CD71, CD73, CD90, CD105, CD166, CD27, GITR, TIGIT, LAG3, TCR, CD40L, OX40, PD-1, CTLA-4, or STRO-1. Bispecific immune cell engagers may function by recruiting an immune cell to a PD-L1 positive cell (e.g., a PD-L1 positive cancer cell, an immune cell associated with an autoimmune response, or a pancreatic beta cell). In some embodiments, the immune cell binding agent may bind to a T cell, a B cell, a macrophage, a natural killer cell, a fibroblast, a regulatory T cell, a regulatory immune cell, a neural stem cell, or a mesenchymal stem cell and may recruit the T cell, B cell, macrophage, natural killer cell, fibroblast, regulatory T cell, regulatory immune cell, neural stem cell, or mesenchymal stem cell to the PD-L1 positive cell. For example, an immune cell targeting agent that binds CD3, 4-1BB, CD28, or CD137 may recruit T cells to the PD-L1 positive cell. In another example, an immune cell targeting agent that binds CD89 may recruit macrophages to the PD-L1 positive cell. In another example, an immune cell targeting agent that binds CD16 may recruit natural killer cells to the PD-L1 positive cell. In another example, an immune cell targeting agent that binds CD25 may recruit regulatory T cells to the PD-L1 positive cell. In another example, an immune cell targeting agent that binds CD13, CD29, CD44, CD71, CD73, CD90, CD105, CD166, CD27, GITR, TIGIT, LAG3, TCR, CD40L, OX40, PD-1, CTLA-4, or STRO-1 may recruit mesenchymal stem cells or other immune cells to the PD-L1 positive cell. An example of an immune cell targeting agent that binds CD3 may comprise a sequence of SEQ ID NO: 122 or SEQ ID NO: 442-SEQ ID NO: 471. An example of an immune cell targeting agent that binds CD28 may comprise a sequence of SEQ ID NO: 472-SEQ ID NO: 481. An example of an immune cell targeting agent that binds CD25 may comprise a sequence of SEQ ID NO: 482-SEQ ID NO: 491. Examples of immune cell targeting agents are provided in TABLE 2.

TABLE 2
Exemplary Immune Cell Targeting Agents

| SEQ ID | | |
|---|---|---|
| NO | Sequence | Target |
| SEQ ID | EVQLVESGGGLVQPGGSLKLSCAASGFTFNKYAMNWVRQAPGK | CD3 |
| NO: 122 | GLEWVARIRSKYNNYATYYADSVKDRFTISRDDSKNTAYLQMN | |
| | NLKTEDTAVYYCVRHGNFGNSYISYWAYWGQGTLVTVSSGGGG | |
| | SGGGGSGGGGSQTVVTQEPSLTVSPGGTVTLTCGSSTGAVTSGN | |
| | YPNWVQQKPGQAPRGLIGGTKFLAPGTPARFSGSLLGGKAALTL | |
| | SGVQPEDEAEYYCVLWYSNRWVFGGGTKLTVL | |
| SEQ ID | EVQLLESGGGLVQPGGSLRLSCAASGFTFSSFPMAWVRQAPGKG | CD3 |
| NO: 442 | LEWVSTISTSGGRTYYRDSVKGRFTISRDNSKNTLYLQMNSLRAE | |
| | DTAVYYCAKFRQYSGGFDYWGQGTLVTVSS | |
| SEQ ID | DIQLTQPNSVSTSLGSTVKLSCTLSSGNIENNYVHWYQLYEGRSP | CD3 |
| NO: 443 | TTMIYDDDKRPDGVPDRFSGSIDRSSNSAFLTIHNVAIEDEAIYFC | |
| | HSYVSSFNVFGGGTKLTVL | |
| SEQ ID | SFPMA | CD3 |
| NO: 444 | | |
| SEQ ID | TISTSGGRTYYRDSVKG | CD3 |
| NO: 445 | | |
| SEQ ID | FRQYSGGFDY | CD3 |
| NO: 446 | | |
| SEQ ID | TLSSGNIENNYVH | CD3 |
| NO: 447 | | |
| SEQ ID | DDDKRPD | CD3 |
| NO: 448 | | |
| SEQ ID | HSYVSSFNV | CD3 |
| NO: 449 | | |
| SEQ ID | EVQLLESGGGLVQPGGSLRLSCAASGFTFSSFPMAWVRQAPGKG | CD3 |
| NO: 450 | LEWVSTISTSGGRTYYRDSVKGRFTISRDNSKNTLYLQMNSLRAE | |
| | DTAVYYCAKFRQYSGGFDYWGQGTLVTVSSGGGGSGGGGSGG | |
| | GGSDIQLTQPNSVSTSLGSTVKLSCTLSSGNIENNYVHWYQLYEG | |
| | RSPTTMIYDDDKRPDGVPDRFSGSIDRSSNSAFLTIHNVAIEDEAIY | |
| | FCHSYVSSFNVFGGGTKLTVL | |
| SEQ ID | DIQLTQPNSVSTSLGSTVKLSCTLSSGNIENNYVHWYQLYEGRSP | CD3 |
| NO: 451 | TTMIYDDDKRPDGVPDRFSGSIDRSSNSAFLTIHNVAIEDEAIYFC | |
| | HSYVSSFNVFGGGTKLTVLGGGGSGGGGSGGGGSEVQLLESGGG | |
| | LVQPGGSLRLSCAASGFTFSSFPMAWVRQAPGKGLEWVSTISTSG | |
| | GRTYYRDSVKGRFTISRDNSKNTLYLQMNSLRAEDTAVYYCAKF | |
| | RQYSGGFDYWGQGTLVTVSS | |
| SEQ ID | QVQLVESGGGVVQPGRSLRLSCAASGFKFSGYGMHWVRQAPGK | CD3 |
| NO: 452 | GLEWVAVIWYDGSKKYYVDSVKGRFTISRDNSKNTLYLQMNSL | |
| | RAEDTAVYYCARQMGYWHFDLWGRGTLVTVSS | |
| SEQ ID | EIVLTQSPATLSLSPGERATLSCRASQSVSSYLAWYQQKPGQAPR | CD3 |
| NO: 453 | LLIYDASNRATGIPARFSGSGSGTDFTLTISSLEPEDFAVYYCQQRS | |
| | NWPPLTFGGGTKVEIK | |
| SEQ ID | GYGMH | CD3 |
| NO: 454 | | |
| SEQ ID | VIWYDGSKKYYVDSVKG | CD3 |
| NO: 455 | | |
| SEQ ID | QMGYWHFDL | CD3 |
| NO: 456 | | |
| SEQ ID | RASQSVSSYLA | CD3 |
| NO: 457 | | |
| SEQ ID | DASNRAT | CD3 |
| NO: 458 | | |
| SEQ ID | QQRSNWPPLT | CD3 |
| NO: 459 | | |
| SEQ ID | QVQLVESGGGVVQPGRSLRLSCAASGFKFSGYGMHWVRQAPGK | CD3 |
| NO: 460 | GLEWVAVIWYDGSKKYYVDSVKGRFTISRDNSKNTLYLQMNSL | |
| | RAEDTAVYYCARQMGYWHFDLWGRGTLVTVSSGGGGSGGGGS | |
| | GGGGSEIVLTQSPATLSLSPGERATLSCRASQSVSSYLAWYQQKP | |
| | GQAPRLLIYDASNRATGIPARFSGSGSGTDFTLTISSLEPEDFAVY | |
| | YCQQRSNWPPLTFGGGTKVEIK | |
| SEQ ID | EIVLTQSPATLSLSPGERATLSCRASQSVSSYLAWYQQKPGQAPR | CD3 |
| NO: 461 | LLIYDASNRATGIPARFSGSGSGTDFTLTISSLEPEDFAVYYCQQRS | |
| | NWPPLTFGGGTKVEIKGGGGSGGGGSGGGGSQVQLVESGGGVV | |
| | QPGRSLRLSCAASGFKFSGYGMHWVRQAPGKGLEWVAVIWYD | |
| | GSKKYYVDSVKGRFTISRDNSKNTLYLQMNSLRAEDTAVYYCA | |
| | RQMGYWHFDLWGRGTLVTVSS | |
| SEQ ID | QVQLVQSGGGVVQPGRSLRLSCKASGYTFTRYTMHWVRQAPGK | CD3 |
| NO: 462 | GLEWIGYINPSRGYTNYNQKVKDRFTISRDNSKNTAFLQMDSLRP | |
| | EDTGVYFCARYYDDHYCLDYWGQGTPVTVSS | |
| SEQ ID | DIQMTQSPSSLSASVGDRVTITCSASSSVSYMNWYQQTPGKAPKR | CD3 |
| NO: 463 | WIYDTSKLASGVPSRFSGSGSGTDYTFTISSLQPEDIATYYCQQWS | |
| | SNPFTFGQGTKLQI | |
| SEQ ID | RYTMH | CD3 |
| NO: 464 | | |
| SEQ ID | YINPSRGYTNYNQKVKD | CD3 |
| NO: 465 | | |
| SEQ ID | YYDDHYCLDY | CD3 |
| NO: 466 | | |
| SEQ ID | SASSSVSYMN | CD3 |
| NO: 467 | | |
| SEQ ID | DTSKLAS | CD3 |
| NO: 468 | | |
| SEQ ID | QQWSSNPFT | CD3 |
| NO: 469 | | |
| SEQ ID | QVQLVQSGGGVVQPGRSLRLSCKASGYTFTRYTMHWVRQAPGK | CD3 |
| NO: 470 | GLEWIGYINPSRGYTNYNQKVKDRFTISRDNSKNTAFLQMDSLRP | |
| | EDTGVYFCARYYDDHYCLDYWGQGTPVTVSSGGGGSGGGGSG | |
| | GGGSDIQMTQSPSSLSASVGDRVTITCSASSSVSYMNWYQQTPGK | |
| | APKRWIYDTSKLASGVPSRFSGSGSGTDYTFTISSLQPEDIATYYC | |
| | QQWSSNPFTFGQGTKLQI | |
| SEQ ID | DIQMTQSPSSLSASVGDRVTITCSASSSVSYMNWYQQTPGKAPKR | CD3 |
| NO: 471 | WIYDTSKLASGVPSRFSGSGSGTDYTFTISSLQPEDIATYYCQQWS | |
| | SNPFTFGQGTKLQIGGGGSGGGGSGGGGSQVQLVQSGGGVVQPG | |
| | RSLRLSCKASGYTFTRYTMHWVRQAPGKGLEWIGYINPSRGYTN | |
| | YNQKVKDRFTISRDNSKNTAFLQMDSLRPEDTGVYFCARYYDDH | |
| | YCLDYWGQGTPVTVSS | |
| SEQ ID | QVQLVQSGAEVKKPGASVKVSCKASGYTFTSYYIHWVRQAPGQ | CD28 |
| NO: 472 | GLEWIGCIYPGNVNTNYNEKFKDRATLTVDTSISTAYMELSRLRS | |
| | DDTAVYFCTRSHYGLDWNFDVWGQGTTVTVSS | |
| SEQ ID | DIQMTQSPSSLSASVGDRVTITCHASQNIYVWLNWYQQKPGKAP | CD28 |
| NO: 473 | KLLIYKASNLHTGVPSRFSGSGSGTDFTLTISSLQPEDFATYYCQQ | |
| | GQTYPYTFGGGTKVEIK | |
| SEQ ID | SYYIH | CD28 |
| NO: 474 | | |
| SEQ ID | CIYPGNVNTNYNEKFKD | CD28 |
| NO: 475 | | |
| SEQ ID | SHYGLDWNFDV | CD28 |
| NO: 476 | | |
| SEQ ID | HASQNIYVWLN | CD28 |
| NO: 477 | | |
| SEQ ID | KASNLHT | CD28 |
| NO: 478 | | |
| SEQ ID | QQGQTYPYT | CD28 |
| NO: 479 | | |
| SEQ ID | QVQLVQSGAEVKKPGASVKVSCKASGYTFTSYYIHWVRQAPGQ | CD28 |
| NO: 480 | GLEWIGCIYPGNVNTNYNEKFKDRATLTVDTSISTAYMELSRLRS | |
| | DDTAVYFCTRSHYGLDWNFDVWGQGTTVTVSSGGGGSGGGGS | |
| | GGGGSDIQMTQSPSSLSASVGDRVTITCHASQNIYVWLNWYQQK | |
| | PGKAPKLLIYKASNLHTGVPSRFSGSGSGTDFTLTISSLQPEDFAT | |
| | YYCQQGQTYPYTFGGGTKVEIK | |
| SEQ ID | DIQMTQSPSSLSASVGDRVTITCHASQNIYVWLNWYQQKPGKAP | CD28 |
| NO: 481 | KLLIYKASNLHTGVPSRFSGSGSGTDFTLTISSLQPEDFATYYCQQ | |
| | GQTYPYTFGGGTKVEIKGGGGSGGGGSGGGGSQVQLVQSGAEV | |
| | KKPGASVKVSCKASGYTFTSYYIHWVRQAPGQGLEWIGCIYPGN | |
| | VNTNYNEKFKDRATLTVDTSISTAYMELSRLRSDDTAVYFCTRS | |
| | HYGLDWNFDVWGQGTTVTVSS | |
| SEQ ID | QVQLVQSGAEVKKPGSSVKVSCKASGYTFTSYRMHWVRQAPGQ | CD25 |
| NO: 482 | GLEWIGYINPSTGYTEYNQKFKDKATITADESTNTAYMELSSLRS | |
| | EDTAVYYCARGGGVFDYWGQGTLVTVSS | |
| SEQ ID | DIQMTQSPSTLSASVGDRVTITCSASSSISYMHWYQQKPGKAPKL | CD25 |
| NO: 483 | LIYTTSNLASGVPARFSGSGSGTEFTLTISSLQPDDFATYYCHQRS | |
| | TYPLTFGQGTKVEVK | |
| SEQ ID | SYRMH | CD25 |
| NO: 484 | | |
| SEQ ID | YINPSTGYTEYNQKFKD | CD25 |
| NO: 485 | | |
| SEQ ID | GGGVFDY | CD25 |
| NO: 486 | | |
| SEQ ID | SASSSISYMH | CD25 |
| NO: 487 | | |
| SEQ ID | TTSNLAS | CD25 |
| NO: 488 | | |
| SEQ ID | HQRSTYPLT | CD25 |
| NO: 489 | | |
| SEQ ID | QVQLVQSGAEVKKPGSSVKVSCKASGYTFTSYRMHWVRQAPGQ | CD25 |
| NO: 490 | GLEWIGYINPSTGYTEYNQKFKDKATITADESTNTAYMELSSLRS | |
| | EDTAVYYCARGGGVFDYWGQGTLVTVSSGGGGSGGGGSGGGG | |
| | SDIQMTQSPSTLSASVGDRVTITCSASSSISYMHWYQQKPGKAPK | |
| | LLIYTTSNLASGVPARFSGSGSGTEFTLTISSLQPDDFATYYCHQR | |
| | STYPLTFGQGTKVEVK | |
| SEQ ID | DIQMTQSPSTLSASVGDRVTITCSASSSISYMHWYQQKPGKAPKL | CD25 |
| NO: 491 | LIYTTSNLASGVPARFSGSGSGTEFTLTISSLQPDDFATYYCHQRS | |
| | TYPLTFGQGTKVEVKGGGGSGGGGSGGGGSQVQLVQSGAEVKK | |
| | PGSSVKVSCKASGYTFTSYRMHWVRQAPGQGLEWIGYINPSTGY | |
| | TEYNQKFKDKATITADESTNTAYMELSSLRSEDTAVYYCARGGG | |
| | VFDYWGQGTLVTVSS | |

[0236] An immune cell targeting agent (e.g., a binding moiety that binds CD3, 4-1BB, CD28, CD137, CD89, CD16, CD25, CD13, CD29, CD44, CD71, CD73, CD90, CD105, CD166, CD27, GITR, TIGIT, LAG3, TCR, CD40L, OX40, PD-1, CTLA-4, or STRO-1) may be complexed with a PD-L1-binding peptide via a linker (e.g., a peptide linker). In some embodiments, the immune cell targeting agent and the PD-L1-binding peptide may form a single polypeptide chain. In some embodiments, the immune cell targeting agent and the PD-L1-binding peptide may be complexed by forming a heterodimer via a heterodimerization domain. The immune cell targeting agent may be linked or fused to a first heterodimerization domain and the PD-L1-binding peptide may be linked or fused to a second heterodimerization domain. The first heterodimerization domain may bind to the second heterodimerization domain to form a heterodimeric complex comprising the immune cell targeting agent and the PD-L1-binding peptide. For example, the PD-L1-binding peptide may be linked or fused to an Fc “knob” peptide (e.g., SEQ ID NO: 124) and the immune cell targeting agent may be linked or fused ton an Fc “hole” peptide (e.g., SEQ ID NO: 125). In another example, the PD-L1-binding peptide may be linked or fused to an Fc “hole” peptide (e.g., SEQ ID NO: 125) and the immune cell targeting agent may be linked or fused ton an Fc “knob” peptide (e.g., SEQ ID NO: 124). An example of a PD-L1-binding half of a heterodimeric T cell engager may comprise a sequence of SEQ ID NO: 119 or SEQ ID NO: 120. An example of immune cell targeting half of a heterodimeric T cell engager that binds CD3 may comprise a sequence of SEQ ID NO: 123. In some embodiments, a PD-L1-binding peptide (e.g., any one of SEQ ID NO: 1-SEQ ID NO: 118, SEQ ID NO: 435, SEQ ID NO: 436, or SEQ ID NO: 554-SEQ ID NO: 567) may form a heterodimer with an immune cell binding moiety via a heterodimerization domain provided in TABLE 3. For example, the PD-L1-binding peptide may be fused to chain 1 of an Fc pair (e.g., SEQ ID NO: 126) and the immune cell binding moiety may be fused to chain 2 of the Fc pair (e.g., SEQ ID NO: 127). In another example, the PD-L1-binding peptide may be fused to chain 2 of an Fc pair (e.g., SEQ ID NO: 129) and the immune cell binding moiety may be fused to chain 1 of the Fc pair (e.g., SEQ ID NO: 128). It is understood that the paired heterodimerization domains denoted by “Pairs” in TABLE 3 (e.g., chain 1 and 2 of a given Pair) that one of “Chains” the Pair may be fused to the immune cell binding moiety and the other “Chain” fused to PD-L1-binding peptide, or vice versa, to form the heterodimer.

TABLE 3
Exemplary Heterodimerization Domains

| Fc | SEQ ID | |
|---|---|---|
| Name | NO | Sequence |
| Fc | SEQ ID | EPKSSDKTHTCPPCPAPELLGGPSVFLFPPKPKDTLMISRTPEVTCV |
| knob | NO: 124 | VVDVSHEDPEVKFNWYVDGVEVHNAKTKPREEQYASTYRVVSV |
| Chain 1 | | LTVLHQDWLNGKEYKCKVSNKALGAPIEKTISKAKGQPREPQVY |
| Pair 0 | | TLPPSRDELTKNQVSLWCLVKGFYPSDIAVEWESNGQPENNYKT |
| | | TPPVLDSDGSFFLYSKLTVDKSRWQQGNVFSCSVMHEALHNHYT |
| | | QKSLSLSPGK |
| Fc hole | SEQ ID | EPKSSDKTHTCPPCPAPELLGGPSVFLFPPKPKDTLMISRTPEVTCV |
| Chain 2 | NO: 125 | VVDVSHEDPEVKFNWYVDGVEVHNAKTKPREEQYASTYRVVSV |
| Pair 0 | | LTVLHQDWLNGKEYKCKVSNKALGAPIEKTISKAKGQPREPQVY |
| | | TLPPSRDELTKNQVSLSCAVKGFYPSDIAVEWESNGQPENNYKTT |
| | | PPVLDSDGSFFLVSKLTVDKSRWQQGNVFSCSVMHEALHNHYTQ |
| | | KSLSLSPGK |
| Chain 1 | SEQ ID | EPKSCDKTHTCPPCPAPELLGGPSVFLFPPKPKDTLMISRTPEVTC |
| Pair 1 | NO: 126 | VVVDVSHEDPEVKFNWYVDGVEVHNAKTKPREEQYNSTYRVVS |
| | | VLTVLHQDWLNGKEYKCKVSNKALPAPIEKTISKAKGQPREPQV |
| | | YTLPPSRDELTKNQVSLWCLVKGFYPSDIAVEWESNGQPENNYK |
| | | TTPPVLDSDGSFFLYSKLTVDKSRWQQGNVFSCSVMHEALHNHY |
| | | TQKSLSLSPGK |
| Chain 2 | SEQ ID | EPKSCDKTHTCPPCPAPELLGGPSVFLFPPKPKDTLMISRTPEVTC |
| Pair 1 | NO: 127 | VVVDVSHEDPEVKFNWYVDGVEVHNAKTKPREEQYNSTYRVVS |
| | | VLTVLHQDWLNGKEYKCKVSNKALPAPIEKTISKAKGQPREPQV |
| | | YTLPPSRDELTKNQVSLSCAVKGFYPSDIAVEWESNGQPENNYKT |
| | | TPPVLDSDGSFFLVSKLTVDKSRWQQGNVFSCSVMHEALHNHYT |
| | | QKSLSLSPGK |
| Chain 1 | SEQ ID | EPKSCDKTHTCPPCPAPELLGGPSVFLFPPKPKDTLMISRTPEVTC |
| Pair 2 | NO: 128 | VVVDVSHEDPEVKFNWYVDGVEVHNAKTKPREEQYNSTYRVVS |
| | | VLTVLHQDWLNGKEYKCKVSNKALPAPIEKTISKAKGQPREPQV |
| | | YTLPPCRDELTKNQVSLWCLVKGFYPSDIAVEWESNGQPENNYK |
| | | TTPPVLDSDGSFFLYSKLTVDKSRWQQGNVFSCSVMHEALHNHY |
| | | TQKSLSLSPGK |
| Chain 2 | SEQ ID | EPKSCDKTHTCPPCPAPELLGGPSVFLFPPKPKDTLMISRTPEVTC |
| Pair 2 | NO: 129 | VVVDVSHEDPEVKFNWYVDGVEVHNAKTKPREEQYNSTYRVVS |
| | | VLTVLHQDWLNGKEYKCKVSNKALPAPIEKTISKAKGQPREPQV |
| | | CTLPPSRDELTKNQVSLSCAVKGFYPSDIAVEWESNGQPENNYKT |
| | | TPPVLDSDGSFFLVSKLTVDKSRWQQGNVFSCSVMHEALHNHYT |
| | | QKSLSLSPGK |
| Chain 1 | SEQ ID | EPKSCDKTHTCPPCPAPELLGGPSVFLFPPKPKDTLMISRTPEVTC |
| Pair 3 | NO: 130 | VVVDVSHEDPEVKFNWYVDGVEVHNAKTKPREEQYNSTYRVVS |
| | | VLTVLHQDWLNGKEYKCKVSNKALPAPIEKTISKAKGQPREPQV |
| | | YTLPPSRDELTKNQVSLTCLVKGFYPSDIAVEWESNGQPENNYDT |
| | | TPPVLDSDGSFFLYSDLTVDKSRWQQGNVFSCSVMHEALHNHYT |
| | | QKSLSLSPGK |
| Chain 2 | SEQ ID | EPKSCDKTHTCPPCPAPELLGGPSVFLFPPKPKDTLMISRTPEVTC |
| Pair 3 | NO: 131 | VVVDVSHEDPEVKFNWYVDGVEVHNAKTKPREEQYNSTYRVVS |
| | | VLTVLHQDWLNGKEYKCKVSNKALPAPIEKTISKAKGQPREPQV |
| | | YTLPPSRKELTKNQVSLTCLVKGFYPSDIAVEWESNGQPENNYKT |
| | | TPPVLKSDGSFFLYSKLTVDKSRWQQGNVFSCSVMHEALHNHYT |
| | | QKSLSLSPGK |
| Chain 1 | SEQ ID | EPKSCDKTHTCPPCPAPELLGGPSVFLFPPKPKDTLMISRTPEVTC |
| Pair 4 | NO: 132 | VVVDVSHEDPEVKFNWYVDGVEVHNAKTKPREEQYNSTYRVVS |
| | | VLTVLHQDWLNGKEYKCKVSNKALPAPIEKTISKAKGQPREPQV |
| | | YTLPPSRDELTKNQVHLTCLVKGFYPSDIAVEWESNGQPENNYK |
| | | TTPPVLDSDGSFALYSKLTVDKSRWQQGNVFSCSVMHEALHNHY |
| | | TQKSLSLSPGK |
| Chain 2 | SEQ ID | EPKSCDKTHTCPPCPAPELLGGPSVFLFPPKPKDTLMISRTPEVTC |
| Pair 4 | NO: 133 | VVVDVSHEDPEVKFNWYVDGVEVHNAKTKPREEQYNSTYRVVS |
| | | VLTVLHQDWLNGKEYKCKVSNKALPAPIEKTISKAKGQPREPQV |
| | | TTLPPSRDELTKNQVSLTCLVKGFYPSDIAVEWESNGQPENNYKT |
| | | FPPVLDSDGSFFLYSKLTVDKSRWQQGNVFSCSVMHEALHNHYT |
| | | QKSLSLSPGK |
| Chain 1 | SEQ ID | EPKSCEKTHTCPECPAPELLGGPSVFLFPPKPKDTLMISRTPEVTC |
| Pair 5 | NO: 134 | VVVDVSHEDPEVKFNWYVDGVEVHNAKTKPREEQYNSTYRVVS |
| | | VLTVLHQDWLNGKEYKCKVSNKALPAPIEKTISKAKGQPREPQV |
| | | YTLPPSRDELTKNQVSLTCEVKGFYPSDIAVEWESNGQPENNYKT |
| | | TPPVLDSDGSFFLYSKLTVDKSRWQQGNVFSCSVMHEALHNHYT |
| | | QKSLSLSPGK |
| Chain 2 | SEQ ID | EPKSCRKTHTCPRCPAPELLGGPSVFLFPPKPKDTLMISRTPEVTC |
| Pair 5 | NO: 135 | VVVDVSHEDPEVKFNWYVDGVEVHNAKTKPREEQYNSTYRVVS |
| | | VLTVLHQDWLNGKEYKCKVSNKALPAPIEKTISKAKGQPREPQV |
| | | YTLPPSRDELTKNQVSLTCLVKGFYPSDIAVEWESNGQPENNYKT |
| | | TPPVLDSDGSFFLYSRLTVDKSRWQQGNVFSCSVMHEALHNHYT |
| | | QKSLSLSPGK |
| Chain 1 | SEQ ID | EPKSCDKTHTCPPCPAPELLGGPSVFLFPPKPKDTLMISRTPEVTC |
| Pair 6 | NO: 136 | VVVDVSHEDPEVKFNWYVDGVEVHNAKTKPREEQYNSTYRVVS |
| | | VLTVLHQDWLNGKEYKCKVSNKALPAPIEKTISKAKGQPREPQV |
| | | YTLPPSRDELTKNQVSLTCLVKGFYPSDIAVEWESNGQPENNYKT |
| | | TPPVLDSDGSFLLYSKLTVDKSRWQQGNVFSCSVMHEALHNHYT |
| | | QKSLSLSPGK |
| Chain 2 | SEQ ID | EPKSCDKTHTCPPCPAPELLGGPSVFLFPPKPKDTLMISRTPEVTC |
| Pair 6 | NO: 137 | VVVDVSHEDPEVKFNWYVDGVEVHNAKTKPREEQYNSTYRVVS |
| | | VLTVLHQDWLNGKEYKCKVSNKALPAPIEKTISKAKGQPREPQV |
| | | YTLPPSRDELTKNQVSLTCLVKGFYPSDIAVEWESNGQPENNYKT |
| | | TPPVLDSDGSFFLYSRLTVDKSRWQQGNVFSCSVMHEALHNHYT |
| | | QKSLSLSPGK |
| Chain 1 | SEQ ID | EPKSCDKTHTCPPCPAPELLGGPSVFLFPPKPKDTLMISRTPEVTC |
| Pair 7 | NO: 138 | VVVDVSHEDPEVKFNWYVDGVEVHNAKTKPREEQYNSTYRVVS |
| | | VLTVLHQDWLNGKEYKCKVSNKALPAPIEKTISKAKGQPREPQV |
| | | YVLPPSRDELTKNQVSLLCLVKGFYPSDIAVEWESNGQPENNYLT |
| | | WPPVLDSDGSFFLYSKLTVDKSRWQQGNVFSCSVMHEALHNHY |
| | | TQKSLSLSPGK |
| Chain 2 | SEQ ID | EPKSCDKTHTCPPCPAPELLGGPSVFLFPPKPKDTLMISRTPEVTC |
| Pair 7 | NO: 139 | VVVDVSHEDPEVKFNWYVDGVEVHNAKTKPREEQYNSTYRVVS |
| | | VLTVLHQDWLNGKEYKCKVSNKALPAPIEKTISKAKGQPREPQV |
| | | YVYPPSRDELTKNQVSLTCLVKGFYPSDIAVEWESNGQPENNYK |
| | | TTPPVLDSDGSFALVSKLTVDKSRWQQGNVFSCSVMHEALHNHY |
| | | TQKSLSLSPGK |
| Chain 1 | SEQ ID | EPKSCDKTHTCPPCPAPELLGGPSVFLFPPKPKDTLMISRTPEVTC |
| Pair 8 | NO: 140 | VVVDVSHEDPEVKFNWYVDGVEVHNAKTKPREEQYNSTYRVVS |
| | | VLTVLHQDWLNGKEYKCKVSNKALPAPIEKTISKAKGQPREPQV |
| | | YTLPPSRDELTENQVSLTCLVKGFYPSDIAVEWESNGQPENNYKT |
| | | TPPVLDSDGSFFLYSWLTVDKSRWQQGNVFSCSVMHEALHNHY |
| | | TQKSLSLSPGK |
| Chain 2 | SEQ ID | EPKSCDKTHTCPPCPAPELLGGPSVFLFPPKPKDTLMISRTPEVTC |
| Pair 8 | NO: 141 | VVVDVSHEDPEVKFNWYVDGVEVHNAKTKPREEQYNSTYRVVS |
| | | VLTVLHQDWLNGKEYKCKVSNKALPAPIEKTISKAKGQPREPRV |
| | | YTLPPSRDELTKNQVSLTCLVKGFYPSDIAVEWESNGQPENNYKT |
| | | TPPVLVSDGSFTLYSKLTVDKSRWQQGNVFSCSVMHEALHNHYT |
| | | QKSLSLSPGK |
| Chain 1 | SEQ ID | EPKSCDKTHTCPPCPAPELLGGPSVFLFPPKPKDTLMISRTPEVTC |
| Pair 9 | NO: 142 | VVVDVSHEDPEVKFNWYVDGVEVHNAKTKPREEQYNSTYRVVS |
| | | VLTVLHQDWLNGKEYKCKVSNKALPAPIEKTISKAKGQPREPQV |
| | | CTLPPSRDELTENQVSLTCLVKGFYPSDIAVEWESNGQPENNYKT |
| | | TPPVLDSDGSFFLYSWLTVDKSRWQQGNVFSCSVMHEALHNHY |
| | | TQKSLSLSPGK |
| Chain 2 | SEQ ID | EPKSCDKTHTCPPCPAPELLGGPSVFLFPPKPKDTLMISRTPEVTC |
| Pair 9 | NO: 143 | VVVDVSHEDPEVKFNWYVDGVEVHNAKTKPREEQYNSTYRVVS |
| | | VLTVLHQDWLNGKEYKCKVSNKALPAPIEKTISKAKGQPREPRV |
| | | YTLPPCRDELTKNQVSLTCLVKGFYPSDIAVEWESNGQPENNYKT |
| | | TPPVLVSDGSFTLYSKLTVDKSRWQQGNVFSCSVMHEALHNHYT |
| | | QKSLSLSPGK |
| Chain 1 | SEQ ID | EPKSCDKTHTCPPCPAPELLGGPSVFLFPPKPKDTLMISRTPEVTC |
| Pair 10 | NO: 144 | VVVDVSHEDPEVKFNWYVDGVEVHNAKTKPREEQYNSTYRVVS |
| | | VLTVLHQDWLNGKEYKCKVSNKALPAPIEKTISKAKGQPREPQV |
| | | YTLPPSRDELTKNQVSLTCLVEGFYPSDIAVEWESNGQPENNYKT |
| | | TPPVLDSDGSFFLYSWLTVDKSRWQQGNVFSCSVMHEALHNHY |
| | | TQKSLSLSPGK |
| Chain 2 | SEQ ID | EPKSCDKTHTCPPCPAPELLGGPSVFLFPPKPKDTLMISRTPEVTC |
| Pair 10 | NO: 145 | VVVDVSHEDPEVKFNWYVDGVEVHNAKTKPREEQYNSTYRVVS |
| | | VLTVLHQDWLNGKEYKCKVSNKALPAPIEKTISKAKGQPREPQV |
| | | YTLPPSRDNLTKNQVSLTCLVKGFYPSDIAVEWESNGQPENNYKT |
| | | TPPVLVSDGSFTLYSKLTVDKSRWQQGNVFSCSVMHEALHNHYT |
| | | QKSLSLSPGK |
| Chain 1 | SEQ ID | EPKSCDKTHTCPPCPAPELLGGPSVFLFPPKPKDTLMISRTPEVTC |
| Pair 11 | NO: 146 | VVVDVSHEDPEVKFNWYVDGVEVHNAKTKPREEQYNSTYRVVS |
| | | VLTVLHQDWLNGKEYKCKVSNKALPAPIEKTISKAKGQPREPQV |
| | | YTLPPSRDELTDNQVSLTCLVKGFYPSDIAVEWESNGQPENNYKT |
| | | TPPVLMSDGSFFLASKLTVDKSRWQQGNVFSCSVMHEALHNHYT |
| | | QKSLSLSPGK |
| Chain 2 | SEQ ID | EPKSCDKTHTCPPCPAPELLGGPSVFLFPPKPKDTLMISRTPEVTC |
| Pair 11 | NO: 147 | VVVDVSHEDPEVKFNWYVDGVEVHNAKTKPREEQYNSTYRVVS |
| | | VLTVLHQDWLNGKEYKCKVSNKALPAPIEKTISKAKGQPRRPRV |
| | | YTLPPSRDELTKNQVSLVCLVKGFYPSDIAVEWESNGQPENNYKT |
| | | TPPVLDSDGSFFLYSVLTVDKSRWQQGNVFSCSVMHEALHNHYT |
| | | QKSLSLSPGK |
| Chain 1 | SEQ ID | EPKSCDKTHTCPPCPAPELLGGPSVFLFPPKPKDTLMISRTPEVTC |
| Pair 12 | NO: 148 | VVVDVSHEDPEVKFNWYVDGVEVHNAKTKPREEQYNSTYRVVS |
| | | VLTVLHQDWLNGKEYKCKVSNKALPAPIEKTISKAKGQPREPQV |
| | | STLPPSRDELTKNQVSLMCLVYGFYPSDIAVEWESNGQPENNYKT |
| | | TPPVLDSDGSFFLYSVLTVDKSRWQQGNVFSCSVMHEALHNHYT |
| | | QKSLSLSPGK |
| Chain 2 | SEQ ID | EPKSCDKTHTCPPCPAPELLGGPSVFLFPPKPKDTLMISRTPEVTC |
| Pair 12 | NO: 149 | VVVDVSHEDPEVKFNWYVDGVEVHNAKTKPREEQYNSTYRVVS |
| | | VLTVLHQDWLNGKEYKCKVSNKALPAPIEKTISKAKGQPREPQV |
| | | YTLPPSRGDLTKNQVQLTCLVKGFYPSDIAVEWESNGQPENNYK |
| | | TTPPVLDSDGSFFLASKLTVDKSRWQQGNVFSCSVMHEALHNHY |
| | | TQKSLSLSPGK |
| Chain 1 | SEQ ID | EPKSCDKTHTCPPCPAPELLGGPSVFLFPPKPKDTLMISRTPEVTC |
| Pair 13 | NO: 150 | VVVDVSHEDPEVKFNWYVDGVEVHNAKTKPREEQYNSTYRVVS |
| | | VLTVLHQDWLNGKEYKCKVSNKALPAPIEKTISKAKGQPREPQV |
| | | YTDPPSRDELTKNQVSLTCEVKGFYPSDIAVEWESNGQPENNYKT |
| | | TPPVLDSDGSFFLYSKLTVDKSRWQQGNVFSCSVMHEALHNHYT |
| | | QKSLSLSPGK |
| Chain 2 | SEQ ID | EPKSCDKTHTCPPCPAPELLGGPSVFLFPPKPKDTLMISRTPEVTC |
| Pair 13 | NO: 151 | VVVDVSHEDPEVKFNWYVDGVEVHNAKTKPREEQYNSTYRVVS |
| | | VLTVLHQDWLNGKEYKCKVSNKALPAPIEKTISKAKGQPREPQV |
| | | YTKPPSRDELTKNQVSLKCLVKGFYPSDIAVEWESNGQPENNYK |
| | | TTPPVLDSDGSFFLYSKLTVDKSRWQQGNVFSCSVMHEALHNHY |
| | | TQKSLSLSPGK |
| Chain 1 | SEQ ID | EPKSCDKTHTCPPCPAPELLGGPSVFLFPPKPKDTLMISRTPEVTC |
| Pair 14 | NO: 152 | VVVDVSHEDPEVKFNWYVDGVEVHNAKTKPREEQYNSTYRVVS |
| | | VLTVLHQDWLNGKEYKCKVSNKALPAPIEKTISKAKGQPREPQV |
| | | YTLPPSRDELTKNQVSLTCDVSGFYPSDIAVEWESNGQPENNYKT |
| | | TPPVLDSDGSFFLYSKLTVDKSRWQQGNVFSCSVMHEALHNHYT |
| | | QKSLSLSPGK |
| Chain 2 | SEQ ID | EPKSCDKTHTCPPCPAPELLGGPSVFLFPPKPKDTLMISRTPEVTC |
| Pair 14 | NO: 153 | VVVDVSHEDPEVKFNWYVDGVEVHNAKTKPREEQYNSTYRVVS |
| | | VLTVLHQDWLNGKEYKCKVSNKALPAPIEKTISKAKGQPREPQV |
| | | YTLPPSRDQLTKNQVKLTCLVKGFYPSDIAVEWESNGQPENNYK |
| | | TTPPVLDSDGSFFLYSKLTVDKSRWQQGNVFSCSVMHEALHNHY |
| | | TQKSLSLSPGK |

[0237] In some cases, the PD-L1 binding peptide and the immune cell targeting agent may both be presented as dimers, such as by placing or positioning the PD-L1 binding peptide on the N- or C-terminus of a homodimeric Fc fusion and placing or positioning the immune cell targeting agent on the other end (the C- or N-terminus) of a homodimeric Fc fusion. An exemplary homodimeric Fc of SEQ ID NO: 1 and an anti-CD3 scFv (EVQLVESGGGLVQPGGSLKLSCAASGFTFNKYAMNWVRQAPGKGLEWVARIRSKYN NYATYYADSVKDRFTISRDDSKNTAYLQMNNLKTEDTAVYYCVRHGNFGNSYISYWA YWGQGTLVTVSSGGGGSGGGGSGGGGSQTVVTQEPSLTVSPGGTVTLTCGSSTGAVTS GNYPNWVQQKPGQAPRGLIGGTKFLAPGTPARFSGSLLGGKAALTLSGVQPEDEAEYY CVLWYSNRWVFGGGTKLTVL; SEQ TD NO: 122) is shown in SEQ TD NO: 121. Additional examples of Shomodimeric F fusions are provided in SEQ TD NO: 438-SEQ ID NO: 441. Examples of components that may be homodimerized or heterodimerized to form a bispecific immune cell engager are provided in TABLE 4. For example, a PD-L1-binding Fe hole component (e.g., SEQ ID NO: 119 or SEQ TD NO: 120) may heterodimerize with an anti-CD3 Fe knob component (e.g., SEQ TD NO: 123) to form a PD-L1/CD3-binding BiICE.

TABLE 4
Exemplary BiICE Components

| Name | SEQ ID NO | Sequence |
|---|---|---|
| PD-L1- | SEQ ID NO: | EEDCKVHCVKEWMAGKACAERDKSYTIGRAHCSGQKFDVFK |
| binder Fc | 119 | CLDHCAAPGGGGSGGGGSGGGGSEPKSSDKTHTCPPCPAPELL |
| hole | | GGPSVFLFPPKPKDTLMISRTPEVTCVVVDVSHEDPEVKFNWY |
| | | VDGVEVHNAKTKPREEQYASTYRVVSVLTVLHQDWLNGKEY |
| | | KCKVSNKALGAPIEKTISKAKGQPREPQVYTLPPSRDELTKNQ |
| | | VSLSCAVKGFYPSDIAVEWESNGQPENNYKTTPPVLDSDGSFF |
| | | LVSKLTVDKSRWQQGNVFSCSVMHEALHNHYTQKSLSLSPGK |
| PD-L1- | SEQ ID NO: | EEDCKVHCVKEWMAGKACAERNKSYTIGRAHCSGQKFDVFK |
| binder Fc | 120 | CLDHCAAPGGGGSGGGGSGGGGSEPKSSDKTHTCPPCPAPELL |
| hole | | GGPSVFLFPPKPKDTLMISRTPEVTCVVVDVSHEDPEVKFNWY |
| | | VDGVEVHNAKTKPREEQYASTYRVVSVLTVLHQDWLNGKEY |
| | | KCKVSNKALGAPIEKTISKAKGQPREPQVYTLPPSRDELTKNQ |
| | | VSLSCAVKGFYPSDIAVEWESNGQPENNYKTTPPVLDSDGSFF |
| | | LVSKLTVDKSRWQQGNVFSCSVMHEALHNHYTQKSLSLSPGK |
| Anti-CD3 Fc | SEQ ID NO: | EVQLVESGGGLVQPGGSLKLSCAASGFTFNKYAMNWVRQAP |
| PD-L1- | 121 | GKGLEWVARIRSKYNNYATYYADSVKDRFTISRDDSKNTAYL |
| binder | | QMNNLKTEDTAVYYCVRHGNFGNSYISYWAYWGQGTLVTVS |
| | | SGGGGSGGGGSGGGGSQTVVTQEPSLTVSPGGTVTLTCGSSTG |
| | | AVTSGNYPNWVQQKPGQAPRGLIGGTKFLAPGTPARFSGSLLG |
| | | GKAALTLSGVQPEDEAEYYCVLWYSNRWVFGGGTKLTVLGG |
| | | GGSEPKSSDKTHTCPPCPAPELLGGPSVFLFPPKPKDTLMISRTP |
| | | EVTCVVVDVSHEDPEVKFNWYVDGVEVHNAKTKPREEQYAS |
| | | TYRVVSVLTVLHQDWLNGKEYKCKVSNKALGAPIEKTISKAK |
| | | GQPREPQVYTLPPSRDELTKNQVSLTCLVKGFYPSDIAVEWES |
| | | NGQPENNYKTTPPVLDSDGSFFLYSKLTVDKSRWQQGNVFSCS |
| | | VMHEALHNHYTQKSLSLSPGKGGGGSGGGGSGGGGSEEDCK |
| | | VHCVKEWMAGKACAERQKSYTIGRAHCSGQKFDVFKCLDHC |
| | | AAP |
| Anti-CD3 Fc | SEQ ID NO: | EVQLVESGGGLVQPGGSLKLSCAASGFTFNKYAMNWVRQAP |
| knob | 123 | GKGLEWVARIRSKYNNYATYYADSVKDRFTISRDDSKNTAYL |
| | | QMNNLKTEDTAVYYCVRHGNFGNSYISYWAYWGQGTLVTVS |
| | | SGGGGSGGGGSGGGGSQTVVTQEPSLTVSPGGTVTLTCGSSTG |
| | | AVTSGNYPNWVQQKPGQAPRGLIGGTKFLAPGTPARFSGSLLG |
| | | GKAALTLSGVQPEDEAEYYCVLWYSNRWVFGGGTKLTVLGG |
| | | GGSEPKSSDKTHTCPPCPAPELLGGPSVFLFPPKPKDTLMISRTP |
| | | EVTCVVVDVSHEDPEVKFNWYVDGVEVHNAKTKPREEQYAS |
| | | TYRVVSVLTVLHQDWLNGKEYKCKVSNKALGAPIEKTISKAK |
| | | GQPREPQVYTLPPSRDELTKNQVSLWCLVKGFYPSDIAVEWES |
| | | NGQPENNYKTTPPVLDSDGSFFLYSKLTVDKSRWQQGNVFSCS |
| | | VMHEALHNHYTQKSLSLSPGK |
| PD-L1- | SEQ ID NO: | EEDCKVHCVKEWMAGKACAERDKSYTIGRAHCSGQKFDVFK |
| binder Fc | 437 | CLDHCAAPGGGGSGGGGSGGGGSEPKSSDKTHTCPPCPAPELL |
| | | GGPSVFLFPPKPKDTLMISRTPEVTCVVVDVSHEDPEVKFNWY |
| | | VDGVEVHNAKTKPREEQYASTYRVVSVLTVLHQDWLNGKEY |
| | | KCKVSNKALGAPIEKTISKAKGQPREPQVYTLPPSRDELTKNQ |
| | | VSLTCLVKGFYPSDIAVEWESNGQPENNYKTTPPVLDSDGSFFL |
| | | YSKLTVDKSRWQQGNVFSCSVMHEALHNHYTQKSLSLSPGK |
| PD-L1- | SEQ ID NO: | EEDCKVHCVKEWMAGKACAERDKSYTIGRAHCSGQKFDVFK |
| binder Anti- | 438 | CLDHCAAPGGGGSGGGGSGGGGSEVQLVESGGGLVQPGGSLK |
| CD3-scFc | | LSCAASGFTFNKYAMNWVRQAPGKGLEWVARIRSKYNNYAT |
| | | YYADSVKDRFTISRDDSKNTAYLQMNNLKTEDTAVYYCVRHG |
| | | NFGNSYISYWAYWGQGTLVTVSSGGGGSGGGGSGGGGSQTV |
| | | VTQEPSLTVSPGGTVTLTCGSSTGAVTSGNYPNWVQQKPGQAP |
| | | RGLIGGTKFLAPGTPARFSGSLLGGKAALTLSGVQPEDEAEYY |
| | | CVLWYSNRWVFGGGTKLTVL |
| PD-L1- | SEQ ID NO: | EEDCKVHCVKEWMAGKACAERDKSYTIGRAHCSGQKFDVFK |
| binder Anti- | 439 | CLDHCAAPEPKSSDKTHTEVQLVESGGGLVQPGGSLKLSCAAS |
| CD3-scFc | | GFTFNKYAMNWVRQAPGKGLEWVARIRSKYNNYATYYADSV |
| | | KDRFTISRDDSKNTAYLQMNNLKTEDTAVYYCVRHGNFGNSY |
| | | ISYWAYWGQGTLVTVSSGGGGSGGGGSGGGGSQTVVTQEPSL |
| | | TVSPGGTVTLTCGSSTGAVTSGNYPNWVQQKPGQAPRGLIGGT |
| | | KFLAPGTPARFSGSLLGGKAALTLSGVQPEDEAEYYCVLWYSN |
| | | RWVFGGGTKLTVL |
| PD-L1- | SEQ ID NO: | EEDCKVHCVKEWMAGKACAERDKSYTIGRAHCSGQKFDVFK |
| binder Anti- | 440 | CLDHCAAPGGGGSGGGGSGGGGSLKEAKEKAIEELKKAGITSD |
| CD3-scFc | | YYFDLINKAKTVEGVNALKDEILKAGGGGSGGGGSGGGGSEV |
| | | QLVESGGGLVQPGGSLKLSCAASGFTFNKYAMNWVRQAPGK |
| | | GLEWVARIRSKYNNYATYYADSVKDRFTISRDDSKNTAYLQM |
| | | NNLKTEDTAVYYCVRHGNFGNSYISYWAYWGQGTLVTVSSG |
| | | GGGSGGGGSGGGGSQTVVTQEPSLTVSPGGTVTLTCGSSTGAV |
| | | TSGNYPNWVQQKPGQAPRGLIGGTKFLAPGTPARFSGSLLGGK |
| | | AALTLSGVQPEDEAEYYCVLWYSNRWVFGGGTKLTVL |
| PD-L1- | SEQ ID NO: | EEDCKVHCVKEWMAGKACAERDKSYTIGRAHCSGQKFDVFK |
| binder Anti- | 441 | CLDHCAAPEPKSSDKTHTLKEAKEKAIEELKKAGITSDYYFDLI |
| CD3-scFc | | NKAKTVEGVNALKDEILKAEPKSSDKTHTEVQLVESGGGLVQ |
| | | PGGSLKLSCAASGFTFNKYAMNWVRQAPGKGLEWVARIRSKY |
| | | NNYATYYADSVKDRFTISRDDSKNTAYLQMNNLKTEDTAVYY |
| | | CVRHGNFGNSYISYWAYWGQGTLVTVSSGGGGSGGGGSGGG |
| | | GSQTVVTQEPSLTVSPGGTVTLTCGSSTGAVTSGNYPNWVQQ |
| | | KPGQAPRGLIGGTKFLAPGTPARFSGSLLGGKAALTLSGVQPE |
| | | DEAEYYCVLWYSNRWVFGGGTKLTVL |

[0238] In some embodiments, the immune cell targeting agent may be a single chain variable fragment (scFv), a cysteine-dense peptide, an avimer, a kunitz domain, an affibody, an adnectin, a nanofittin, a fynomer, a ß-hairpin, a stapled peptide, a bicyclic peptide, an antibody, an antibody fragment, a protein, a peptide, a peptide fragment, a binding domain, a small molecule, or a nanobody that binds the immune cell target (e.g., CD3, 4-1BB, CD28, CD137, CD89, CD16, CD25, CD13, CD29, CD44, CD71, CD73, CD90, CD105, CD166, CD27, GITR, TIGIT, LAG3, TCR, CD40L, OX40, PD-1, CTLA-4, or STRO-1).

[0239] Upon delivery, an immune cell (e.g., a T cell, a B cell, a macrophage, or a natural killer cell) may inactivate, inhibit, kill, or protect the PD-L1 positive cell. The function of the bispecific immune cell engager may depend on the type of immune cell recruited. In some embodiments, the immune cell (e.g., a regulatory T cell) may inhibit the PD-L1 positive cell (e.g., a PD-L1 positive T cell). For example, a bispecific immune cell engager comprising a CD25-binding agent may recruit a regulatory T cell to a PD-L1 positive T cell associated with an autoimmune response and inhibit the T cell.

[0240] A targeted immune cell (e.g., a T cell, a B cell, a macrophage, or a natural killer cell) can interact with the PD-L1-expressing cell via the immune cell binding moiety in the BiICE, producing an energetically favorable interface that enables a close proximity or narrow enough immune synapse of the immune cell engager to a cell, for example a targeted cancer cell. The immunological synapse may be narrow enough to enable signal exchange between the targeted cell, engaged by the PD-L1-binding peptide, and the targeted immune cell, engaged by the immune cell binding moiety, resulting in an immune response against the cancer cell. For example, bispecific PD-L1 binding peptide-CD3 BiICE molecules (e.g., comprising a PD-L1-binding CDP complexed with a CD3-binding moiety) can bind to both CD3 on the immune cell and PD-L1 on the target cell, producing an energetically favorable interface. The space between an immune cell and a target cell is referred to as an immune synapse, and in normal T cells it is primarily driven by a complex between the T cell receptor (TCR) on the T cell and a peptide-MHC complex on the target cell. In some embodiments, the immune synapse may function as a kinapse, or moving synapse. The width of this synapse is the distance between the cell membranes of the immune cell and the target cell. In some embodiments, such as in a TCR-driven synapse, the width of the synapse may be about 15 nm. In some embodiments, the synapse may have a width of from about 3 nm to about 25 nm, from about 5 nm to about 20 nm, or from about 10 nm to about 15 nm. In some embodiments, the synapse may have a width of about 3 nm, about 5 nm, about 8 nm, about 10 nm, about 13 nm, about 15 nm, about 18 nm, about 20 nm, about 23 nm, or about 25 nm. In some embodiments, the synapse may have a width of less than 3 nm, less than 5 nm, less than 8 nm, less than 10 nm, less than 13 nm, less than 15 nm, less than 18 nm, less than 20 nm, less than 23 nm, less than 25 nm, less than 30 nm, less than 35 nm, less than 40 nm, less than 45 nm, less than 50 nm, less than 55 nm, less than 60 nm, less than 65 nm, less than 70 nm, less than 75 nm, less than 80 nm, less than 85 nm, less than 90 nm, less than 95 nm, or less than 100 nm. A BiICE molecule may induce an immunological synapse of dimensions dependent on the size of the BiICE and binding location on the respective targets (e.g., the immune cell and the cancer cell). For example, larger molecules with more space between the binding entities will produce a larger synapse. The immunological synapse size can determine the efficacy of a T cell response, such as the rate of degranulation, activation and exhaustion dynamics, and T cell mobility within the tumor microenvironment. BiICE molecules containing smaller binding moieties, such as CDPs, can form immunological synapses that are smaller than can be achieved with bispecific molecules containing larger binding moieties like antibodies. In some embodiments, a smaller synapse formed between a T cell and a cancer cell may yield a more potent T cell killing response due to closer proximity of the T cell to the cancer cell. The interaction between a PD-L1-binding CDP and PD-L1 (e.g., between SEQ ID NO: 1 and PD-L1) may place the termini of the CDP close to the surface of PD-L1. In contrast, an scFv may bind to PD-L1 in an orientation such that the termini of the scFv may be as far as 5 nm away from the surface of PD-L1, resulting in an immunological synapse diameter of as much as 5 nm greater than an immunological synapse formed with a PD-L1-binding CDP. A 5 nm increase in synapse diameter may have substantial biochemical or physiological consequences since a typical immune cell synapse is about 15 nm. A narrower synapse, such as formed by a BiICE containing a PD-L1-binding CDP, may trigger a potent T cell killing response. In some embodiments, the immunological synapse of a PD-L1-binding peptide complex (e.g., a BiICE containing a PD-L1-binding CDP) is about 3 nm, about 5 nm, about 8 nm, about 10 nm, about 13 nm, about 15 nm, about 18 nm, about 20 nm, about 23 nm, or about 25 nm. In some embodiments, the immunological synapse of a PD-L1-binding peptide complex is no more than 3 nm, no more than 4 nm, no more than 5 nm, no more than 6 nm, no more than 7 nm, no more than 8 nm, no more than 9 nm, no more than 10 nm, no more than 13 nm, no more than 15 nm, no more than 18 nm, no more than 20 nm, no more than 23 nm, no more than 25 nm, no more than 30 nm, no more than 35 nm, no more than 40 nm, no more than 45 nm, no more than 50 nm, no more than 60 nm, no more than 65 nm, no more than 70 nm, no more than 75 nm, no more than 80 nm, no more than 85 nm, no more than 90 nm, no more than 95 nm, or no more than 100 nm.

### Chimeric Antigen Receptors

[0241] A PD-L1-binding peptide of the present disclosure (e.g., any one of SEQ ID NO: 1-SEQ ID NO: 118, SEQ ID NO: 435, SEQ ID NO: 436, or SEQ ID NO: 554-SEQ ID NO: 567) may be complexed with one or more components of a chimeric antigen receptor to form a PD-L1-binding chimeric antigen receptor. In some embodiments, a PD-L1-binding peptide may be linked or fused to a transmembrane domain, an intracytoplasmic domain, a heavy chain variable domain, a light chain variable domain, or combinations thereof, of a chimeric antigen receptor (CAR). In some embodiments, a PD-L1-binding peptide may replace a single chain variable fragment (scFv) of a chimeric antigen receptor to form a PD-L1-binding chimeric antigen receptor (PD-L1-binding CAR). For example, a PD-L1-binding CAR may comprise a PD-L1-binding peptide (e.g., any one of SEQ ID NO: 1-SEQ ID NO: 118, SEQ ID NO: 435, SEQ ID NO: 436, or SEQ ID NO: 554-SEQ ID NO: 567), a linker (e.g., SEQ ID NO: 154-SEQ ID NO: 241 or SEQ ID NO: 433), a transmembrane domain, and an intracellular costimulatory domain. In some embodiments, a nucleotide sequence encoding a PD-L1-binding chimeric antigen receptor may be expressed in an immune cell (e.g., a T cell). The PD-L1-binding chimeric antigen receptor may be expressed on the surface of the immune cell. In some embodiments, the PD-L1-binding chimeric antigen receptor may function by recruiting the T cell to a PD-L1 positive cell (e.g., a PD-L1 positive cancer cell) and killing or inactivating the PD-L1 positive cell.

### Peptide Oligonucleotide Complexes

[0242] In some embodiments, an active agent may comprise an oligonucleotide. A PD-L1-binding peptide (e.g., any one of SEQ ID NO: 1-SEQ ID NO: 118, SEQ ID NO: 435, SEQ ID NO: 436, or SEQ ID NO: 554-SEQ ID NO: 567) may be complexed with an oligonucleotide to form a peptide oligonucleotide complex, also referred to as a peptide-nucleotide agent conjugate, a peptide oligonucleotide complex, or a peptide target-binding agent complex, may comprise a peptide complexed with a nucleotide (e.g., an oligonucleotide). The peptide of the peptide oligonucleotide complex may comprise a PD-L1-binding peptide, as described herein. In some embodiments, the peptide may be a PD-L1-binding peptide (e.g., any one of SEQ ID NO: 1-SEQ ID NO: 118, SEQ ID NO: 435, SEQ ID NO: 436, or SEQ ID NO: 554-SEQ ID NO: 567). A PD-L1-binding peptide of a peptide oligonucleotide complex may mediate binding of the peptide oligonucleotide complex to PD-L1, which may facilitate endocytosis or transcytosis of the peptide oligonucleotide complex across a cell barrier or entry into a cancer cell or tissue. For example, a peptide oligonucleotide complex comprising a PD-L1-binding peptide may cross a cellular membrane, enabling interactions between the nucleotide of the peptide oligonucleotide complex and various cytosolic or nuclear components (e.g., genomic DNA, an ORF, mRNA, pre-mRNA, or DNA). In some embodiments, a peptide oligonucleotide complex comprising a PD-L1-binding peptide may cross a cellular membrane by being endocytosed into a cell. A PD-L1-binding peptide of a peptide oligonucleotide complex may be a pH-dependent PD-L1-binding peptide engineered to have higher binding affinity for PD-L1 at an extracellular pH (e.g., pH 7.4) and lower binding affinity at an endosomal pH (e.g., pH 5.5 or pH 6.5).

[0243] The nucleotide of the peptide oligonucleotide complex may be a target-binding agent comprising single stranded DNA, single stranded RNA, double stranded DNA, double stranded RNA, or a combination thereof. As used herein, the term “nucleotide” may refer to an oligonucleotide or polynucleotide molecule or to a single nucleotide base. For example, a nucleotide of a peptide complex may comprise a DNA or RNA oligonucleotide. In some embodiments, the nucleotide may be a small interfering RNA (siRNA), a micro RNA (miRNA, or miR), an anti-miR, an antisense RNA, an antisense oligonucleotide (ASO), a complementary RNA, a complementary DNA, an interfering RNA, a small nuclear RNA (snRNA), a spliceosomal RNA, an inhibitory RNA, a nuclear RNA, an oligonucleotide complementary to a natural antisense transcript (NAT), an aptamer, a gapmer, a splice blocker ASO, or a U1 adapter. For example, a nucleotide of the peptide oligonucleotide complex may comprise a sequence of any one of any one of SEQ ID NO: 366-SEQ ID NO: 396 or a sequence complementary to a portion of any sequence provided in SEQ ID NO: 397-SEQ ID NO: 430 or SEQ ID NO: 549 or an open reading frame listed in TABLE 17. In some embodiments, the nucleotide may be an siRNA that inhibits translation of a target mRNA by promoting degradation of the target mRNA. In some embodiments, the nucleotide may be an miRNA that inhibits translation of a target mRNA by promoting cleavage or destabilization of the target mRNA. In some embodiments, the nucleotide may be an aptamer that binds to a target protein, thereby inhibiting protein-protein interactions with the target protein, inhibiting enzymatic activity of the target protein, or activating the target protein.

[0244] Examples of structures of various peptide oligonucleotide complexes (e.g., CDP-oligonucleotide complexes containing alternative and nonconventional bases) are illustrated in FIG. 23. Examples of oligonucleotides include an aptamer, a gapmer, an anti-miR, an siRNA, a splice blocker ASO, and a U1 adapter. The peptide portion of the peptide oligonucleotide complex (e.g., a CDP of a CDP-oligonucleotide complex) can be used to guide the nucleotide sequence (e.g., an oligonucleotide of a CDP-oligonucleotide complex) to a specific tissue, target, or cell.

[0245] In some embodiments, a peptide oligonucleotide complex binds PD-L1 with an affinity of no more than 10 nM, 5 nM, 1 nM, 800 pM, 600 pM, 500 pM, 400 pM, 300 pM, 250 pM, or 200 pM. In some embodiments, the affinity is identical or similar at pH 7.0 as at pH 7.4, identical or similar at pH 6.5 as at pH 7.4, identical or similar at pH 6.0 as at pH 7.4, or identical or similar at pH 5.5 as at pH 7.4. In some embodiments, the affinity is within ±nM, ±3 nM, ±5 nM, ±10 nM, ±30 pM, ±50 pM, ±100 pM, ±300 pM, ±500 pM, or ±1000 pM, when compared at pH 7.0 and pH 7.4, pH 6.5 and pH 7.4, pH 6.0 and pH 7.4, or pH 5.5 and pH 7.4. In some embodiments, the affinity is within 1-fold, 2-fold, 3-fold, 5-fold or 10-fold relative difference when compared at pH 7.0 and pH 7.4, pH 6.5 and pH 7.4, pH 6.0 and pH 7.4, or pH 5.5 and pH 7.4. In some aspects, the affinity of the peptide oligonucleotide complex binds the PD1 molecule is higher at a higher pH than at a lower pH. In some aspects, the higher pH is pH 7.4, pH 7.2, pH 7.0, or pH 6.8. In some aspects, the lower pH is pH 6.5, pH 6.0, pH 5.5, pH 5.0, or pH 4.5. In some aspects, the affinity of the peptide oligonucleotide complex for PD-L1 is higher at pH 7.4 than at pH 6.0. In some aspects, the affinity of the peptide oligonucleotide complex for PD-L1 is higher at pH 7.4 than at pH 5.5. In some aspects, the target binding peptide is capable of binding the target molecule with a dissociation constant (K_{D}) of no more than 100 nM, no more than 20 nM, no more than 10 nM, no more than 5 nM, no more than 2 nM, no more than 1 nM, no more than 0.5 nM, no more than 0.2 nM, no more than 1 nM, or no more than 0.1 nM at pH 7.4. In some aspects, the target binding peptide is capable of binding the target molecule with a dissociation constant (K_{D}) of no less than 1 nM, no less than 2 nM, no less than 5 nM, no less than 10 nM, no less than 20 nM, no less than 50 nM, no less than 100 nM, no less than 200 nM, or no less than 500 nM at pH 5.5. In some aspects, the affinity of the peptide oligonucleotide complex for PD-L1 at pH 7.4 is at least 1.25-fold, at least 2-fold, at least 3-fold, at least 4-fold, at least 5-fold, at least 6-fold, at least 7-fold, at least 8-fold, at least 9-fold, at least 10-fold, at least 15-fold, at least 20-fold, at least 50-fold, at least 100-fold, at least 500-fold, at least 1000-fold, at least 5000-fold, or at least 10,000-fold greater than the affinity of the peptide oligonucleotide complex for PD-L1 at pH 5.5.

[0246] The peptide oligonucleotide complexes of the present disclosure may include nucleotide and nucleotide variants within the peptide oligonucleotide complex wherein the nucleotide portion is targeted to specific target molecule for modulation. Modulation of a target molecule may comprise degradation, inhibiting translation, decreasing expression, increasing expression, enhancing a binding interaction (e.g., a protein-protein interaction), or inhibiting a binding interaction (e.g., a protein-protein interaction). Disclosed herein are nucleotide sequences that may be used in the nucleotide portion of the peptide oligonucleotide complex, such as those targeting or complementary to nucleotides (e.g., DNA or RNA molecules) listed in SEQ ID NO: 397-SEQ ID NO: 430 or SEQ ID NO: 549, TABLE 10, or TABLE 17, or to nucleotides (e.g., DNA or RNA molecules) encoding the proteins listed in SEQ ID NO: 397-SEQ ID NO: 430 or SEQ ID NO: 549, TABLE 10, or TABLE 17, or otherwise described herein. Examples of nucleotide sequences that may be used in the nucleotide portion of the peptide oligonucleotide complex include SEQ ID NO: 366-SEQ ID NO: 396 and SEQ ID NO: 492-SEQ ID NO: 545. As disclosed herein, nucleic acid sequences, variants, and properties of the nucleic acids that are used in the nucleic acid portion of the peptide oligonucleotide complex may be referred to as nucleic acids of the present disclosure, nucleotides of the present disclosure, or like terminology. It may be understood that such nucleic acids or nucleotides are described in the context of the peptide oligonucleotide complexes disclosed, such as a nucleotide sequence comprising single stranded (ssDNA, ssRNA), double stranded (dsDNA, dsRNA), or a combination of single and double stranded (for example with a mismatched sequence, hairpin or other structure), an antisense RNA, complementary RNA, inhibitory RNA, interfering RNA, nuclear RNA, antisense oligonucleotide (ASO), microRNA (miRNA), oligonucleotide complementary to a natural antisense transcripts (NATs) sequences, siRNA, snRNA, aptamer, gapmer, anti-miR, splice blocker ASO, or U1 Adapter within the peptide oligonucleotide complex, with the accorded alterations, functions and uses described.

[0247] In some embodiments, the nucleotide sequence (e.g., a target binding agent capable of binding a target molecule) is single stranded (ssDNA, ssRNA), double stranded (dsDNA, dsRNA), or a combination of single and double stranded (for example with a mismatched sequence, hairpin or other structure), an antisense RNA, complementary RNA, inhibitory RNA, interfering RNA, nuclear RNA, antisense oligonucleotide (ASO), microRNA (miRNA), an oligonucleotide complementary to a natural antisense transcripts (NATs) sequences, siRNA, snRNA, aptamer, gapmer, anti-miR, splice blocker ASO, or U1 Adapter. Peptides according to the present disclosure can be conjugated to, linked to, or fused to such nucleotide sequences to make a peptide oligonucleotide complex. In addition, other active agents (e.g., small molecule, protein, or peptide active agents) as described herein can be conjugated to, linked to, complexed with, or fused to such nucleotide sequences, peptides or peptide oligonucleotide complex to form peptide oligonucleotide complex conjugates.

[0248] A nucleotide (e.g., a nucleotide of a peptide oligonucleotide complex) may be fully or partially reverse complementary to all or a portion of a target molecule (e.g., a target DNA or RNA sequence). In some embodiments, a target molecule expresses or encodes a protein (e.g., an mRNA encoding a protein associated with a disease). In some embodiments, a nucleotide may be fully or partially reverse complementary to a portion of an open reading frame encoding a gene or protein of interest. In some embodiments, a nucleotide may be reverse complementary to any portion of an RNA or open reading frame encoding a transcript or protein of interest. Examples of sequences that may serve as target molecules for the target binding nucleotides described herein are provided in SEQ ID NO: 397-SEQ ID NO: 430 and SEQ ID NO: 549 along any portion of its length. In some embodiments, a target molecule may comprise a fragment of any of the sequences provided in TABLE 17 along any portion of its length. In some embodiments, a target molecule may comprise a fragment of any of the sequences provided in SEQ ID NO: 397-SEQ ID NO: 430 or SEQ ID NO: 549. In some embodiments, a target molecule may comprise a sequence with one or more T residues replaced with U or one or more U residues replaced with T.

[0249] A number of technologies can be used to generate therapeutically active nucleotide sequences for use in peptide oligonucleotide complexes that include the PD-L1-binding peptides (e.g., SEQ ID NO: 1-SEQ ID NO: 118, SEQ ID NO: 435, SEQ ID NO: 436, or SEQ ID NO: 554-SEQ ID NO: 567) disclosed herein. Several have examples of molecules in the clinic or advanced clinical development and can be employed for the nucleotide portion within the peptide oligonucleotide complexes described herein. A nucleotide of a peptide oligonucleotide complex may bind to a target molecule (e.g., a target DNA, RNA, or protein) and modulate an activity of the target molecule. In this way, the nucleotide may function as a target-binding agent, also referred to as a targeted agent. Examples of nucleotides that may function as target-binding agents include nucleotide antisense RNAs, complementary RNAs, inhibitory RNAs, interfering RNAs, nuclear RNAs, antisense oligonucleotides, microRNAs, oligonucleotides complementary to natural antisense transcripts, small interfering RNAs, small nuclear RNAs, aptamers, gapmers, anti-miRs, splice blocker antisense oligonucleotides, and U1 adapters.

[0250] Nucleotides (e.g., oligonucleotides targeted to a specific sequence for its regulation) may enter into cells through complexation with a PD-L1-binding peptide to form a PD-L1-binding peptide oligonucleotide complex. The PD-L1-binding peptide oligonucleotide complex may then be endocytosed by PD-L1 or may enter the cell by other mechanisms. The oligonucleotide, with or without complex to the PD-L1-binding peptide (e.g., after linker cleavage), may exit the endosome or lysosome slowly over time through no active mechanism or through mechanisms of endosomal escape or through other mechanisms. The peptide oligonucleotide complex may exit the endosome or lysosome. A fragment or cleavage product of the peptide oligonucleotide complex may exit the endosome or lysosome. The oligonucleotide, the peptide oligonucleotide complex, or any fragment thereof may enter the cytosol and may enter the nucleus.

[0251] Possible mechanisms of action of oligonucleotides are illustrated in FIG. 22. In one embodiment, upon entry into the nucleus, oligonucleotides can (1) bind directly to mRNA structures and prevent the maturation (e.g., capping or splicing) of the targeted sequence, (2) modulate alternative splicing of a targeted sequence, (3) and recruit RNaseH1 to induce cleavage of a targeted sequence. In another embodiment, oligonucleotides in the cytoplasm can bind directly to the target mRNA and sterically block the ribosomal subunits from attaching and/or running along the mRNA transcript during translation hence resulting in lack of translation of the target sequence. In another embodiment, oligonucleotides can also be designed to (4) directly bind to microRNA (miRNA) sequences or natural antisense transcripts (NATs) sequences, each of the foregoing thereby prohibiting miRNAs and NATs from inhibiting their own specific RNA targets, which ultimately leads to reduced degradation or increased translation of one or more sequences themselves targeted by the miRNA or NAT. In another embodiment, siRNA (which may be targeted to a specific sequence and regulate expression of the target sequence) may alternatively be used to bind and regulate a targeted sequence in the cytoplasm (5), engaging an RNA-induced silencing complex (RISC), which is a multiprotein complex that incorporates one strand of a small interfering RNA (siRNA) or micro RNA (miRNA), using the siRNA or miRNA as a template for recognizing complementary mRNA of the targeted sequence. When it finds a complementary strand, its RNase domain cleaves the targeted sequence. In another embodiment, an aptamer (e.g., a nucleotide that modulates a specific protein or other target) may alternatively be used to bind and regulate a target (6). An aptamer (e.g., extracellular or intracellular) may function by directly binding and modulating activity of a protein target, for example by forming aptamer-protein interactions rather than through base pairing or hybridization interactions.

[0252] For example, conventional ASO, or antisense oligonucleotides, are typically 18-30 nucleotides (nt) in length. Several ASO therapeutic strategies exist, two of which (differing in their mechanism of target RNA interference) are further described. The first ASOs are sometimes called “Gapmers” because they have a central region with DNA-based-sugar nucleotides that are often (but not always) flanked by non-DNA-sugar nucleotides with greater resistance to nucleases. The DNA region, at least 4 nt in length but typically >6, causes a DNA/RNA hybrid that engages RNase H endonuclease to cleave the target RNA. Among clinically approved gapmers are fomivirsen and mipomersen. In some embodiments, a DNA region of a gapmer may comprise from about 4 to about 30, from about 4 to about 25, from about 4 to about 20, from about 4 to about 15, from about 4 to about 10, from about 6 to about 30, from about 6 to about 25, from about 6 to about 20, from about 6 to about 15, or from about 6 to about 10 nucleotide residues. In some embodiments, a non-DNA region of a gapmer may comprise about 1, 2, 3, 4, 5, 6, 7, 8, 9, or 10 nucleotide residues 3′ of the DNA region. In some embodiments, a non-DNA region of a gapmer may comprise about 1, 2, 3, 4, 5, 6, 7, 8, 9, or 10 nucleotide residues 5′ of the DNA region. Examples of gapmers are provided in TABLE 5.

TABLE 5
Exemplary Gapmer Sequences

| SEQ ID NO | Sequence | Target |
|---|---|---|
| SEQ ID NO: 383 | 5′-TGACTTGTCAAGTCATCCTT-3′ | MAPT |
| SEQ ID NO: 384 | 5′-GCAGGTTAAGTGATTAACCA-3′ | MAPT |
| SEQ ID NO: 385 | 5′-TCCTCTCCACAATTATTGAC-3′ | MAPT |
| SEQ ID NO: 386 | 5′-GACGTATTTAGGAGAGGAAG-3′ | MAPT |
| SEQ ID NO: 387 | 5′-CTGATACTATGCATGTGGAG-3′ | MAPT |
| SEQ ID NO: 388 | 5′-GCCGGGTCATTATTCTTTTT-3′ | MAPT |
| SEQ ID NO: 492 | 5′-GTTGGTACATAACGTTTTGA-3′ | CBP |
| SEQ ID NO: 493 | 5′-TGAATTCCAGGATAACCTGA-3′ | CBP |
| SEQ ID NO: 494 | 5′-CCCGAACACTAAGTGTTAAT-3′ | CBP |
| SEQ ID NO: 495 | 5′-ACCATGTACATGAATTCAAG-3′ | CBP |
| SEQ ID NO: 496 | 5′-AATCTTCTCGAGTTTCGTAT-3′ | CBP |
| SEQ ID NO: 497 | 5′-TATAGGAATTAGAGCGCTTG-3′ | CBP |
| SEQ ID NO: 498 | 5′-AAAGAAGGCTTCTTCTCTAG-3′ | CBP |
| SEQ ID NO: 499 | 5′-GGCTTCAGCCATTATGTATA-3′ | CBP |
| SEQ ID NO: 500 | 5′-GGGATACATTATAAGCTTGC-3′ | CBP |
| SEQ ID NO: 501 | 5′-TTGATTTGAGAATGTTCAGC-3′ | CBP |
| SEQ ID NO: 502 | 5′-GCTTGGGTATTTTTTGATCA-3′ | CBP |
| SEQ ID NO: 503 | 5′-TCCATGGGATTCTTTACGAT-3′ | CBP |
| SEQ ID NO: 504 | 5′-TGGGGTTAAATGAATTCATC-3′ | CBP |
| SEQ ID NO: 505 | 5′-CTTGTTTATGTAAACGCGAC-3′ | CBP |
| SEQ ID NO: 506 | 5′-TGGGTTACTTAAAGAAGTGG-3′ | CBP |
| SEQ ID NO: 507 | 5′-CCAATTGTGTTTTGAATTCC-3′ | CBP |
| SEQ ID NO: 508 | 5′-CAAAACGTTTTTCATGGTTC-3′ | CBP |
| SEQ ID NO: 509 | 5′-TTGATATCTGTAGGGAAGGT-3′ | CBP |
| SEQ ID NO: 510 | 5′-TAAAGTTAGCATTCATGCAG-3′ | CBP |
| SEQ ID NO: 511 | 5′-TAAAAGGCCTAATTCTCCTC-3′ | CBP |
| SEQ ID NO: 512 | 5′-CGGCCATTTTTAATTCTTTC-3′ | p300 |
| SEQ ID NO: 513 | 5′-GACAGCTGTTTATGTTTAGA-3′ | p300 |
| SEQ ID NO: 514 | 5′-CTGAGTATATGGTGAACCAT-3′ | p300 |
| SEQ ID NO: 515 | 5′-GTGAAATGATTTGTCGAGAA-3′ | p300 |
| SEQ ID NO: 516 | 5′-AGCATATGCAACTAGGTTTT-3′ | p300 |
| SEQ ID NO: 517 | 5′-GTGAATTCTGATGAAGAGCT-3′ | p300 |
| SEQ ID NO: 518 | 5′-TGTGCTACTAGTAGATGGAG-3′ | p300 |
| SEQ ID NO: 519 | 5′-CATCTTCACTTCCTGGGAAG-3′ | p300 |
| SEQ ID NO: 520 | 5′-TTTCCGGTTATATAACCAGG-3′ | p300 |
| SEQ ID NO: 521 | 5′-GTATTGTGCACAACTGTTTG-3′ | p300 |
| SEQ ID NO: 522 | 5′-ATCTGATGCATCTTTCTTCC-3′ | p300 |
| SEQ ID NO: 523 | 5′-GTGCACTTTTCTTTAAACAG-3′ | p300 |
| SEQ ID NO: 524 | 5′-TTTCATGATAGACTGCAGTC-3′ | p300 |
| SEQ ID NO: 525 | 5′-TCCATGGTGGCATATAGTTT-3′ | p300 |
| SEQ ID NO: 526 | 5′-CTTTGAAAAATTTGCACGTG-3′ | p300 |
| SEQ ID NO: 527 | 5′-TTTTGTAAGGCTTGTTGAGA-3′ | p300 |
| SEQ ID NO: 528 | 5′-GAGGTTTGAATTCAAGTCTG-3′ | p300 |
| SEQ ID NO: 529 | 5′-GTCTTTTAGGCTACGAAAGA-3′ | p300 |
| SEQ ID NO: 530 | 5′-TAGAAAATTTTCTGGAGCAC-3′ | p300 |
| SEQ ID NO: 531 | 5′-TACAACAGTTGAGGGTTTTT-3′ | p300 |

[0253] The second conventional ASO simply serves to bind to the target transcript, but not induce RNase degradation, so no DNA-based-sugars are used. Instead, binding is designed to disrupt processing into mature mRNA. One such activity relies on binding to the mRNA at or near splice sites to drive particular splice isoforms in the target RNA, resulting in modulating target RNA by disrupting mRNA splicing and resulting in exon skipping. These are commonly called “splice blocking” or “splice blocker” ASOs amongst other known names. One example is eteplirsen, designed to alter splicing of DMD (dystrophin) gene in Duchenne Muscular Dystrophy patients, correcting a mutation that would otherwise create a truncated and non-functional dystrophin by splicing out the mutant exons and creating a different truncated (but functional) protein to appear.

[0254] Another example is siRNA molecules which specifically interact with the canonical RNAi pathway (the RISC complex) to drive cleavage or steric blocking of hybridized transcripts; cleavage-vs-blocking depends on whether the match is perfect (cleavage) or imperfect but still stable (blocking). Length is typically a double-stranded RNA where the overlapping region is 19-22 and each strand has two extra nt at their 3′ ends. Chemistry is largely RNA-based-sugars, with some DNA-based sugars at the 3′ overhangs. Clinical examples include patisiran (targets TTR) and givosiran (targets ALAS1). In some embodiments, an overlapping region of a siRNA may comprise from about 10 to about 40, from about 10 to about 35, from about 10 to about 30, from about 10 to about 25, from about 10 to about 22, from about 10 to about 21, from about 10 to about 20, from about 15 to about 40, from about 15 to about 35, from about 15 to about 30, from about 15 to about 25, from about 15 to about 22, from about 15 to about 21, from about 15 to about 20, from about 17 to about 40, from about 17 to about 35, from about 17 to about 30, from about 17 to about 25, from about 17 to about 22, from about 17 to about 21, from about 17 to about 20, from about 18 to about 40, from about 18 to about 35, from about 18 to about 30, from about 18 to about 25, from about 18 to about 22, from about 18 to about 21, from about 18 to about 20, from about 19 to about 40, from about 19 to about 35, from about 19 to about 30, from about 19 to about 25, from about 19 to about 22, from about 19 to about 21, or from about 19 to about 20 nucleotide residues. In some embodiments, an overhang region may comprise about 1, 2, 3, 4, 5, 6, 7, 8, 9, or 10 nucleotide residues. Examples of siRNAs are provided in TABLE 6.

TABLE 6
Exemplary siRNA Sequences

| SEQ ID NO | Sequence | Target |
|---|---|---|
| SEQ ID NO: 389 | 3′-AAGUGAUUCGUUGUGUUAUAA-5′ | IL-23R |
| SEQ ID NO: 390 | 5′-AAUUCACUAAGCAACACAAUA-3′ | |
| SEQ ID NO: 391 | 3′-UAGAAGUGUACCUGUGUACAA-5′ | IL-23R |
| SEQ ID NO: 392 | 5′-AAAUCUUCACAUGGACACAUG-3′ | |
| SEQ ID NO: 393 | 3′-CGACGGAACGUUAGACUUGAA-5′ | IL-23R |
| SEQ ID NO: 394 | 5′-AAGCUGCCUUGCAAUCUGAAC-3′ | |
| SEQ ID NO: 395 | 3′-CCACCGUUCUUCAUGAACCAA-5′ | IL-23R |
| SEQ ID NO: 396 | 5′-AAGGUGGCAAGAAGUACUUGG-3′ | |
| SEQ ID NO: 532 | 3′-AUCAUUGAGACCGGUAUCGAA-5′ | CBP |
| SEQ ID NO: 533 | 5′-AAUAGUAACUCUGGCCAUAGC-3′ | |
| SEQ ID NO: 534 | 3′-GUCGUCUACUUCGUCGUCUAA-5′ | CBP |
| SEQ ID NO: 535 | 5′-AACAGCAGAUGAAGCAGCAGA-3′ | |
| SEQ ID NO: 536 | 3′-UUAGGUCCGUAGAUCCAAGAA-5′ | CBP |
| SEQ ID NO: 537 | 5′-AAAAUCCAGGCAUCUAGGUUC-3′ | |
| SEQ ID NO: 538 | 3′-ACAAUGAUCUCUUCUUCGGAA-5′ | CBP |
| SEQ ID NO: 539 | 5′-AAUGUUACUAGAGAAGAAGCC-3′ | |
| SEQ ID NO: 540 | 5′-AAUCUAUCUUCAGUAGCUUGU-3′ | p300 |
| SEQ ID NO: 541 | 5′-AAACAAGCUACUGAAGAUAGA-3′ | p300 |
| SEQ ID NO: 542 | 5′-AAUAAGUGGCAUCACGAGGUA-3′ | p300 |
| SEQ ID NO: 543 | 5′-AAUACCUCGUGAUGCCACUUA-3′ | p300 |
| SEQ ID NO: 544 | 5′-AAGUCUGGUAGAUGGCAACCU-3′ | p300 |
| SEQ ID NO: 545 | 5′-AAAGGUUGCCAUCUACCAGAC-3′ | p300 |

[0255] Another example are anti-miRs. Anti-miRs may function as steric blockers designed against miRNAs that would block a RISC complex loaded with a specific disease-associated miRNA without being subject to cleavage by the RISC complex RNase subunit. One clinical example is miravirsen, a 15-base oligo with a mixture of DNA and LNA sugars that targets miR-122 in hepatitis C patients. An anti-miR nucleotide may be of sufficient length to anneal specifically and stably to the target miR, but the length of the sequence may vary. For example, an anti-miR may have a length of up to about 21 nt, corresponding to the maximum size loaded into RISC. In some embodiments, an anti-miR nucleotide may comprise from about 10 to about 25, from about 10 to about 23, from about 10 to about 21, from about 10 to about 20, from about 10 to about 19, from about 10 to about 18, from about 13 to about 25, from about 13 to about 23, from about 13 to about 21, from about 13 to about 20, from about 13 to about 19, from about 13 to about 18, from about 15 to about 25, from about 15 to about 23, from about 15 to about 21, from about 15 to about 20, from about 15 to about 19, from about 15 to about 18, from about 16 to about 25, from about 16 to about 23, from about 16 to about 21, from about 16 to about 20, from about 16 to about 19, or from about 16 to about 18 nucleotide residues.

[0256] Another example is U1 adapters which have two parts. One anneals to the U1-snRNA of the U1-snRNP complex, and the other binds to the target RNA, bringing the U1-snRNP to the polyA site and inhibiting polyadenylation; absence of a polyA tail causes the mRNA to be degraded. The U1-binding region is at least 10 nt but up to 19 nt. Target binding region can be from about 15 nt to about 25 nt. Chemistry in early studies made heavy use of LNA and 2′-O-Methyl sugars. In some embodiments, a U1 binding region may comprise from about 10 to about 25, from about 10 to about 23, from about 10 to about 21, from about 10 to about 20, from about 10 to about 19, from about 10 to about 18, from about 13 to about 25, from about 13 to about 23, from about 13 to about 21, from about 13 to about 20, from about 13 to about 19, from about 13 to about 18, from about 15 to about 25, from about 15 to about 23, from about 15 to about 21, from about 15 to about 20, from about 15 to about 19, from about 15 to about 18, from about 16 to about 25, from about 16 to about 23, from about 16 to about 21, from about 16 to about 20, from about 16 to about 19, or from about 16 to about 18 nucleotide residues. In some embodiments, a target binding region may comprise from about 10 to about 40, from about 10 to about 35, from about 10 to about 30, from about 10 to about 25, from about 10 to about 22, from about 10 to about 21, from about 10 to about 20, from about 15 to about 40, from about 15 to about 35, from about 15 to about 30, from about 15 to about 25, from about 15 to about 22, from about 15 to about 21, from about 15 to about 20, from about 17 to about 40, from about 17 to about 35, from about 17 to about 30, from about 17 to about 25, from about 17 to about 22, from about 17 to about 21, from about 17 to about 20, from about 18 to about 40, from about 18 to about 35, from about 18 to about 30, from about 18 to about 25, from about 18 to about 22, from about 18 to about 21, from about 18 to about 20, from about 19 to about 40, from about 19 to about 35, from about 19 to about 30, from about 19 to about 25, from about 19 to about 22, from about 19 to about 21, or from about 19 to about 20 nucleotide residues.

[0257] Another example of a nucleotide of the present disclosure is an aptamer. Aptamers disrupt target activity using a mechanism that differs from other nucleotides described herein that form base pairing interactions with a target nucleotide. Aptamers are nucleic acids that form secondary structures (e.g., where a single strand of nucleic acid base-pairs with itself upon folding, creating loops in various locations). Aptamers may be screened for interaction with target proteins. Aptamers may have varied nucleotide chemistry and may include a mixture of conventional RNA and/or DNA sugars and modified sugars (e.g., 2′-O-Methyl (2′-O-Me) RNA or 2′-Fluoro (2′-F) RNA sugars). For example, one clinically approved aptamer, pegaptanib (a VEGF-binding aptamer), has a mixture of 2′-O-Methyl (2′-O-Me) RNA and 2′-Fluoro (2′-F) RNA sugars and regular RNA and DNA sugars. An aptamer sequence may be long enough to form a stable secondary structure (e.g., through intramolecular base pairing), but the length may vary. In some embodiments, an aptamer sequence may comprise from about 20 nt to about 40 nt. For example, experiments that identified pegaptanib used oligos of 20-40 nt in length. Shorter nucleotides (e.g., sequences shorter than about 40 nt) may be advantageous, as longer oligonucleotides may complicate nucleotide synthesis or engage the interferon response pathway. In some embodiments, an aptamer may comprise from about 15 to about 60, from about 15 to about 50, from about 15 to about 40, from about 15 to about 35, from about 15 to about 30, from about 20 to about 60, from about 20 to about 50, from about 20 to about 40, from about 20 to about 35, from about 20 to about 30, from about 25 to about 60, from about 25 to about 50, from about 25 to about 40, from about 25 to about 35, or from about 25 to about 30 nucleotide residues.

[0258] Nucleotides may be designed for use in the peptide nucleotide complexes of the present disclosure. In some embodiments, nucleotides that modify processing, translation, or other RNA functions (e.g., a gapmer, splice blocker, siRNA, anti-miR, or U1 adapter), have one or more of the following properties: (a) 8-50 nt in length, but preferably 12-30 nt in length. It is understood that any length of a nucleotide (nt) can be used within the foregoing ranges; (b) cross-species homology (e.g., by targeting highly-conserved motifs) is often a desirable feature but is not necessary for activity or clinical development; (c) avoidance of common SNPs in humans unless that SNP is involved in disease pathology (e.g., an allele-specific oligo) is often a desirable feature but is not necessary for activity or clinical development; (d) gene specificity (they have minimal homology to other sequences; for example, a sequence may have 3 or more mismatches to every other sequence). (e) avoid predicted secondary structures in both the oligo and the target region (there are software tools available to screen in silico for such secondary structure formation); (f) higher G/C content may be preferable, as G/C-rich sequences (e.g. CCAC, TCCC, GCCA) may be helpful for increasing affinity of the nucleotide to its target, whereas A/T-rich sequences (e.g. TAA) or runs of 4+G (GGGG) may exhibit low or result in structural (G-quadruplex) formation. An oligonucleotide sequence can be 60%, 70%, 75%, 80%, 85%, 90%, 91%, 92%, 93%, 94%, 95%, 96%, 97%, 98%, 99%, or 100% complementarity or match to the target sequence. In some situations, an oligonucleotide with 100% complementarity will result in the target RNA being degraded. In some situations, an oligonucleotide that is less than 100% complementarity may not lead to degradation of the target RNA but may prevent translation and production of the encoded protein.

[0259] In some embodiments, gapmers have one or more of the following properties: (a) 12-30 nt in length. It is understood that any length of a nucleotide (nt) can be used within the foregoing range. (b) target sites are anywhere in the pre-mRNA, including UTRs, exons, or introns (c) central DNA region: minimum of 4 contiguous DNA nucleotides, often 10 or more are used. No artificial substitutions at 2′ site (e.g. 2′-O-methyl [2′-O-ME] or 2′-O-methoxyethyl [2′-O-MOE]) are tolerated due to requirements of RNase H recognition. (d) flanking region: can be DNA- or RNA-based-sugars. 2′ substitutions such as 2′-O-ME or 2′-O-MOE are tolerated. Linked nucleic acids (LNA) and morpholino (phosphorodiamidate morpholino oligo) chemistry are also acceptable in flanking region. (e) Backbone can be natural phosphodiester (PO) or non-natural phosphorothioate (PS) linkages. A clinical example is fomivirsen, a 21 nt gapmer wherein the whole oligo is PS-backbone DNA. Another example is mipomersen, a 20 nt gapmer wherein the entire backbone is PS linkages, and the central region uses DNA sugar flanked by 2′-O-MOE modified RNA. For these two examples, all C bases are 5-methyl-C, though this is not a strict requirement for engagement of RNase H1. Similarly, thiophosphorodiamidate chemistries may be used.

[0260] In some embodiments, steric blockers have one or more of the following properties; (a) as the molecule does not need to engage RNase H or any other enzyme, backbone and sugar chemistry can be more varied, (g) target sites for the nucleotide are complementary to one or more splice sites in the target RNA. A clinical example is eteplirsen, a 30 nt splice blocking ASO wherein whole oligonucleotide uses morpholino (Phosphorodiamidate morpholino oligo) chemistry. Another clinical example is nusinersen, an 18 nt ASO, whose backbone is entirely PS linked and uses 2′-O-MOE RNA chemistry. All C bases are 5-methyl-C, though this is not a strict requirement for engagement of RNase H1. Similarly, thiophosphorodiamidate chemistries may be used.

[0261] In some embodiments, siRNA have one or more of the following properties: (a) can be between 15 and 25 nt in length (between 13 to 23 nt overlap respectively), or up to 25 nt (23 nt overlap) per strand, but 21 nt (19 nt overlap) is common. It is understood that any length of a nucleotide (nt) overlap can be used within the foregoing ranges; (b) complements a sequence typically but not exclusively of 21-nt length in the target mRNA that typically but not exclusively begins with “AA” (c) target sites are ideally found in the mature spliced mRNA as the RISC complex for RNA cleavage is primarily cytosolic; (d) preferably but not exclusively avoids sequences within 100 nt of the mRNA start site, as the transcript at start site is more likely to be occupied by RNA polymerase, (e) successful siRNA constructs typically have more G/C at 5′ end of sense strand, more A/T at 3′ end of sense strand, and are roughly 30-60% in G/C content.

[0262] In some embodiments, anti-miR (anti-miRNA) have one or more of the following properties: (a) a perfect match to target sequence (specifically the 5′ end of the guide strand of the miRNA); (b) length can vary and can even be greater than the length of the mature guide strand. Screening for effective anti-miR constructs may begin with the shortest sequence that achieves specificity (no off-target homology) and increase length from there to empirically determine ideal minimal length for strong miRNA inhibition; (c) 2′ sugar modifications (2′-O-Me, 2′-O-MOE, 2′-F) and LNA sugars are commonly used. Sugars can be a mixture. A clinical example of an anti-miR is miravirsen, which uses a mixture of DNA and LNA sugars (d) PS linkages in backbone are common. PS linkages may reduce affinity, but sugar modifications may increase affinity.

[0263] In some embodiments, aptamers have one or more of the following properties: (a) length of aptamers can vary widely, as there is no biological complex (e.g., RISC) they interact with to function. Although composed of nucleic acids, they are more protein-like in function (e.g., bind to a target protein, etc.). The minimum length may be determined empirically to maintain sufficient stability of intra-strand hybridization to fold into a secondary structure, the upper limit on size is limited only by pharmacology, as longer sequences have a higher risk of engaging inflammatory pathways. Aptamer screening typically begins with libraries of 20-40 nt in length (not including flanking regions required for library amplification during screening); (b) as they form interactions via secondary structure rather than base pairing interactions, there are few limitations for their base patterns, since secondary structures are not only desirable but essential to their function. Design may be empirical for each target; (c) selection is typically via Systematic Evolution of Ligands by EXponential Enrichment (SELEX): random or semi-random sequences between primer-binding flanking regions are exposed to a target of interest on a solid substrate. The pooled oligonucleotide mixture is rinsed from the substrate, leaving only sequences that interact with the target remaining, and then binding sequences are eluted and amplified by PCR. (d) Sugar modifications commonly used include 2′-fluoro (2′-F), 2′-O-MOE, and 2′-O-Me, though other chemistries including (but not limited to) LNA and unlocked-nucleic-acids (UNA) are also possible; (e) backbones are typically PO or PS, but other linkages such as methylphosphonate are possible. A clinical aptamer example, pegaptanib, is entirely PO backbone, but others in development use other linkages. (f) aptamer termini are typically capped with unnatural nucleotide chemistries (e.g. 3′ inverted thymidine) or biotinylated nucleotides to reduce susceptibility to nucleases; (g) because activity is not based on base-pairing, aptamers can be much more creative with chemical modifications of the bases themselves; these can include bases designed to induce covalent bonds with target proteins to permanently disable them; (h) such modifications are tested after selection of an active, high affinity aptamer, as unmodified bases are required for nucleic acid amplification during SELEX (i) if the target protein is extracellular, less considerations are necessary than for cell penetration capabilities.

[0264] In some embodiments, other general design considerations aimed at enhancing pharmacokinetic (PK) properties of the nucleotide, peptide, or peptide oligonucleotide complex include one or more of the following properties: (a) building in conjugation to moieties that reduce clearance or increase cellular uptake including cholesterol or other lipids, diacylglycerol, GalNAc, palmitoyl, PEG, an RGD motif, cell penetrating peptides or moieties (e.g., a PD-L1-binding peptide or cell penetrating peptide as described herein). Adding cholesterol to the peptide oligonucleotide complex can improve biodistribution to the target tissue, increase cellular uptake by endocytosis, and alter the serum pharmacokinetics.

[0265] The therapeutic activity and molecular method of the peptide oligonucleotide complex may depend on which target molecule (e.g., a DNA or RNA) that the nucleic acid complements, or in the case of an aptamer, which target molecule (e.g., protein or other macromolecule) it binds. Target choice can fall into one or more non-mutually exclusive categories such as tissue-target-based or disease-selective. Known targets have known mRNA and genomic sequences that can be used to design a variety of complementary nucleic acids for use in the peptide nucleotide complexes described herein depending on the activity (e.g., gene regulation, protein degradation, reduction of cancer cell activators) desired. Examples of targets are provided in SEQ ID NO: 397-SEQ ID NO: 430 or SEQ ID NO: 549, TABLE 10, and TABLE 17. For example, tissue-targeting may comprise selecting targets acting in the tissues where a PD-L1-binding peptide portion of the peptide oligonucleotide complex would preferentially access or accumulate. For example, serum proteins produced in the liver may be targeted, such as by a TTR to treat transthyretin-related amyloid diseases, or by various apolipoproteins to treat hypercholesterolemia or cardiovascular disease. Moreover, proteins produced in the lungs or lung tissue expressing PD-L1 may be targeted, used to target inflammatory cytokines or cytokine receptors to treat pulmonary disorders (e.g., COPD), or to downregulate receptors (e.g., ACE2) that determine tropism of airborne viruses (e.g., SARS-CoV-2).

[0266] Alternatively, targets can be selected that act in areas where the PD-L1-binding peptide accumulates (e.g., for example in PD-L1-expressing cancer cells), based on known expression of PD-L1 in the tissue or target cell type, or that act where an oligonucleotide that is not complexed with the PD-L1-binding peptide would otherwise be excluded, including tumors. Tumor targeting can be used for peptide oligonucleotide complexes of this disclosure as tumors often have high levels of PD-L1 and are often vascularized enough for rapid perfusion of serum-resident PD-L1-binding peptides and their oligonucleotide cargo. Targets for the peptide oligonucleotide complexes can include oncogenes, for example by designing the nucleic acid portion of the complex to target overexpressed genes or those for which the tumor is lacking a redundant ortholog (i.e., normal cells function by using X or Y, tumors do not express Y, so X is targeted). In addition, disease-selective targeting can be used to treat conditions where the transcript is selectively found in the diseased tissue, and preferentially accumulate there, to improve safety and reduce off-target effects. PD-L1 can also be expressed on tissues such as colon or other gastrointestinal tissue, skeletal muscle, adipose tissue, lymphoid tissue, soft tissue, placenta, seminal vesicles, tonsils, and resting or activated T cells, B cells, dendritic cells, and macrophages. Thus PD-L1 binding peptides of this disclosure can be used to deliver oligonucleotides or other active agents to those tissues.

[0267] The target-binding agent (e.g., a nucleotide of a peptide oligonucleotide complex) may be capable of binding the targets described in SEQ ID NO: 397-SEQ ID NO: 430 or SEQ ID NO: 549, TABLE 10, or TABLE 17, or to nucleotides (e.g., DNA or RNA molecules) encoding the proteins listed in SEQ ID NO: 397-SEQ ID NO: 430 or SEQ ID NO: 549, TABLE 10, or TABLE 17, or otherwise described herein. Examples of nucleotide sequences that may be used in the nucleotide portion of the peptide oligonucleotide complex include SEQ ID NO: 366-SEQ ID NO: 396 and SEQ ID NO: 492-SEQ ID NO: 545. It is understood that any oligonucleotide may be used that is complementary to a portion of the target DNA or RNA molecule. Such target binding agent may comprise a nucleotide sequence is single stranded (ssDNA, ssRNA) or double stranded (dsDNA, dsRNA) or a combination of single and double stranded (for example with a mismatched sequence, hairpin or other structure), an antisense RNA, complementary RNA, inhibitory RNA, interfering RNA, nuclear RNA, antisense oligonucleotide (ASO), microRNA (miRNA), an oligonucleotide complementary to a natural antisense transcripts (NATs) sequences, siRNA, snRNA, aptamer, gapmer, anti-miR, splice blocker ASO, or U1 Adapter. Such oligos may be about 5 to 30 nt in length, 10 to 25 nt in length, 15 to 25 nt in length, 19 to 23 nt in length, or at least 10 nt in length, at least 15 nt in length, at least 20 nt in length, at least 25 nt in length, or at least 30 nt in length, at least 50 nt in length, at least 100 nucleotides in length across any portion of the target RNA. Examples of sequences to which such oligonucleotides may bind (e.g., are complementary to) include SEQ ID NO: 397-SEQ ID NO: 430 and SEQ ID NO: 546-SEQ ID NO: 549, or any genomic or ORF sequence referenced in TABLE 17. One of skill in the art can readily design or determine the length of the target binding agent and whether the target binding agent is complementary to the reference target RNA sequence, and can thus determine using the chemistry of RNA and DNA where such target binding agent will bind to such reference target RNA sequence for the designed length across any portion of the target RNA. Consequently, for any RNA target described herein, including for any of the targets or molecules encoding the targets described in TABLE 10, and SEQ ID NO: 397-SEQ ID NO: 430 and SEQ ID NO: 546-SEQ ID NO: 549, or any genomic or ORF sequence referenced in TABLE 17 such target binding agent of any nt length is described.

[0268] In some embodiments, a nucleotide binds to the target molecule with a melting temperature of not less than 37° C. and not more than 99° C. In some embodiments, a nucleotide binds to the target molecule with a melting temperature of not less than 40° C. and not more than 85° C., not less than 40° C. and not more than 65° C., not less than 40° C. and not more than 55° C., not less than 50° C. and not more than 85° C., not less than 60° C. and not more than 85° C., or not less than 55° C. and not more than 65° C.

[0269] In some embodiments, a nucleotide binds the target molecule with an affinity of not more than 500 nM, not more than 100 nM, not more than 50 nM, not more than 10 nM, not more than 1 nM, not more than 500 pM, not more than 400 pM, not more than 300 pM, not more than 200 pM, or not more than 100 pM. In some embodiments, a nucleotide binds the target molecule with an affinity of not more than 500 nM and not less than 100 pM, not more than 100 nM and not less than 200 pM, not more than 50 nM and not less than 300 pM, not more than 10 nM and not less than 400 pM, or not more than 1 nM and not less than 500 pM.

[0270] In some embodiments, a nucleotide comprises at least 90%, at least 92%, at least 93%, at least 94%, at least 95%, at least 96%, at least 97%, at least 98%, or at least 99% sequence identity to any one of SEQ ID NO: 366-SEQ ID NO: 396. In some embodiments, a nucleotide comprises a sequence of any one of SEQ ID NO: 366-SEQ ID NO: 396, any one of SEQ ID NO: 366-SEQ ID NO: 396 wherein U is replaced with T, or any one of SEQ ID NO: 366-SEQ ID NO: 396 wherein T is replaced with U. In some embodiments, a nucleotide comprises no more than 1, 2, 3, 4, or 5 base changes relative to a sequence of any one of SEQ ID NO: 366-SEQ ID NO: 396.

[0271] In some embodiments, a nucleotide is at least 60%, at least 70%, at least 80%, at least 90%, at least 92%, at least 93%, at least 94%, at least 95%, at least 96%, at least 97%, at least 98%, at least 99%, or 100% reverse complementary to the target molecule. In some embodiments, a nucleotide is 100% reverse complementary to the target molecule. In some embodiments, a nucleotide comprises no more than 1, 2, 3, 4, or 5 base pair mismatches upon binding to the target molecule. In some embodiments, a nucleotide comprises at least 1, 2, 3, 4, or 5 base pair mismatches upon binding to the target molecule.

[0272] In some embodiments, a nucleotide may modulate an activity of a target molecule. In some embodiments, modulating the activity of the target molecule comprises reducing expression of the target molecule, increasing the expression of the target molecule, reducing translation of the target molecule, degrading the target molecule, reducing a level of the target molecule, modifying the processing of the target molecule, modifying the splicing of the target molecule, inhibiting processing of the target molecule, reducing a level of a protein encoded by the target molecule, or blocking an interaction with the target molecule. In some embodiments, the expression of the target molecule is reduced by at least 10%, 25%, 30%, 40%, 50%, 60%, 75%, 80%, 90%, 95%, 99%, 99.5%, or 99.9%. In some embodiments, the translation of the target molecule is reduced by at least 10%, 25%, 30%, 40%, 50%, 60%, 75%, 80%, 90%, 95%, 99%, 99.5%, or 99.9%. In some embodiments, the expression of the target molecule is reduced by a factor of at least 2, 4, 8, 10, 15, 16, 20, 32, 50, 64, 100, 128, 200, 256, 500, 512, or 1000. In some embodiments, the translation of the target molecule is reduced by a factor of at least 2, 4, 8, 10, 15, 16, 20, 32, 50, 64, 100, 128, 200, 256, 500, 512, or 1000. In some embodiments, at least 10%, 25%, 30%, 40%, 50%, 60%, 75%, 80%, 90%, 95%, 99%, 99.5%, or 99.9% of the target molecule is degraded. In some embodiments, the level of the protein encoded by the target molecule is reduced by at least 10%, 25%, 30%, 40%, 50%, 60%, 75%, 80%, 90%, 95%, 99%, 99.5%, or 99.9%. In some embodiments, modifying the splicing of the target molecule increases a level of a protein encoded by the target molecule by at least 10%, 25%, 30%, 40%, 50%, 60%, 75%, 80%, 90%, 95%, 99%, 99.5%, or 99.9%.

[0273] A peptide oligonucleotide complex of the present disclosure may comprise a nucleotide complexed with a protein (e.g., a PD-L1-binding peptide). The nucleotide may comprise single stranded DNA, single stranded RNA, double stranded DNA, double stranded RNA, or combinations thereof. In some embodiments, a nucleotide of a peptide oligonucleotide complex may be non-naturally occurring, also referred to as an “engineered nucleotide”. In some embodiments, a nucleotide may comprise a naturally occurring sequence. A nucleotide may be exogenously expressed, enzymatically synthesized in vitro, or chemically synthesized. For example, a nucleotide may be expressed in a bacterial, yeast, or mammalian cell line and purified for use in a peptide oligonucleotide complex of the present disclosure. In another example, a nucleotide may be enzymatically synthesized in vitro using an RNA or DNA polymerase. In another example, a nucleotide may be chemically synthesized on a solid support using protected nucleotides.

[0274] One example of a chemical synthesis method that may be used to prepare a nucleotide for use in a peptide oligonucleotide complex of the present disclosure is phosphoramidite synthesis. Briefly, single nucleotide residues may be sequentially added from 3′ to 5′ to the growing nucleotide chain by repeating the steps of de-blocking (detritylation), coupling, capping, and oxidation. Phosphoramidite synthesis may be performed on a solid support such as controlled pore glass (CPG) or macroporous polystyrene (MPPS). Similarly, thiophosphorodiamidate may be used.

[0275] A nucleotide of a peptide oligonucleotide complex may bind to a target molecule (e.g., a target DNA, a target RNA, or a target protein). In some embodiments, binding of the oligonucleotide to the target molecule may alter an activity of the target molecule. For example, binding of an oligonucleotide (e.g., an siRNA, an miRNA, a gapmer, or a U1 adaptor) to a target mRNA or pre-mRNA may increase or decrease translation of the target mRNA or pre-mRNA. In another example, binding of a nucleotide to a target DNA may increase or decrease expression of a gene encoded by the target DNA. In another example, binding of a nucleotide to an RNA (such as a transcript, pre-RNA, unspliced RNA, nuclear RNA, complimentary sequence to a NAT, or mRNA) expressed from a target DNA such as a gene or ORF may increase or decrease expression of a gene encoded by the target DNA. In another example, binding of an oligonucleotide (e.g., an aptamer) to a target protein may increase or decrease activity (e.g., an enzymatic activity or a binding activity) of the target protein. In some embodiments, the target molecule may be associated with a disease or condition and increasing or decreasing the activity of the target molecule may treat the disease or condition.

[0276] A sequence of the oligonucleotide of a peptide oligonucleotide complex may be selected for its ability to bind to or modulate the activity of a target molecule. In some embodiments, an oligonucleotide may be reverse complementary to a target DNA or RNA molecule. For example, an siRNA oligonucleotide may be reverse complementary to a target RNA molecule. In some embodiments, am oligonucleotide may be partially reverse complementary (e.g., comprising one or more mis-matched base pairs) to a target DNA or RNA molecule. For example, an siRNA oligonucleotide may comprise a base mismatch relative to a target RNA molecule. In some embodiments, a sequence of the oligonucleotide may be selected for its annealing temperature relative to a target DNA or RNA molecule. A preferred annealing temperature may be achieved by selecting the length of the nucleotide, the degree of complementarity of the nucleotide to the target molecule, the chemistry of the nucleotides, or any combination thereof. Nucleotide sequence parameters (e.g., complementarity, annealing temperature, melting temperature, base mismatches, and binding affinity) may be calculated using any available software, such as ITD OligoAnalyzer and the like. In some embodiments, an oligonucleotide may adopt a secondary structure that binds to a target DNA, RNA, or protein molecule. For example, an aptamer may adopt a secondary structure to bind to a target protein. The aptamer sequence may be selected to adopt a secondary structure that binds to a target protein. Nucleotide secondary structure may be predicted using any available software, such as RNAfold and the like. In some embodiments, a nucleotide sequence may be determined experimentally by selecting for the ability to bind to a target molecule. For example, a nucleotide library may be contacted to a target molecule, and sequences that bind to the target molecule may be identified.

[0277] In some embodiments, a nucleotide comprises a G/C content of not less than 20% and not more than 80%. In some embodiments, a nucleotide comprises a G/C content of not less than 30% and not more than 65%. In some embodiments, the nucleotide comprises a G/C content of not less than 20%, not less than 25%, not less than 30%, not less than 35%, not less than 40%, not less than 45%, or not less than 50%. In some embodiments, the nucleotide comprises a G/C content of not more than 80%, not more than 75%, not more than 70%, not more than 65%, or not more than 50%. In some embodiments, a nucleotide comprises an A/T content or A/U content of not less than 20% and not more than 80%. In some embodiments, a nucleotide comprises an A/T content or A/U content of not less than 30% and not more than 65%. In some embodiments, the nucleotide comprises a A/U (or A/T, or combination of A/U and A/T) content of not less than 20%, not less than 25%, not less than 30%, not less than 35%, not less than 40%, not less than 45%, or not less than 50%. In some embodiments, the nucleotide comprises a A/U content (or A/T, or combination of A/U and A/T) of not more than 80%, not more than 75%, not more than 70%, not more than 65%, or not more than 50%. In some embodiments, a nucleotide has a length of no more than 1000 nt, 600 nt, 200 nt, 100 nt, 60 nt, 56 nt, 52 nt, 50 nt, 48 nt, 46 nt, 44 nt, 22 nt, 40 nt, 38 nt, 36, nt, 34 nt, 32 nt, 30 nt, or 24 nt. In some embodiments, a nucleotide has a length of from 24 to 100 nt, from 24 to 60 nt, from 24 to 50 nt, or from 36 to 50 nt. In some embodiments, a nucleotide has a length of about 42 nt.

[0278] In some embodiments, a nucleotide has a length of no more than 500 nt, 300 nt, 100 nt, 50 nt, 30 nt, 28 nt, 26 nt, 25 nt, 24 nt, 23 nt, 22 nt, 21 nt, 20 nt, 19 nt, 18, nt, 17 nt, 16 nt, 15 nt, or 12 nt. In some embodiments, a nucleotide has a length of from 12 to 50 nt, from 12 to 30 nt, from 12 to 25 nt, from 18 to 25 nt, from 18 to 25 nt, from 19 to 23 nt, or from 20 to 22 nt. In some embodiments, a nucleotide has a length of about 21 nt.

[0279] A peptide oligonucleotide complex of the present disclosure (e.g., a peptide oligonucleotide complex comprising a PD-L1-binding peptide and a nucleotide) may be further conjugated, linked, or fused to an active agent in addition to the nucleotide active agent (e.g., a target-binding agent capable of binding a target molecule). Such additional active agent may be complexed, fused, linked or conjugated to one or more of the peptide, nucleotide, or linker within the peptide oligonucleotide complex. In some embodiments, the active agent may be directly or indirectly linked to the peptide of the peptide oligonucleotide complex or the nucleotide of the peptide oligonucleotide complex. A peptide nucleic acid complex further comprising an additional active agent may be referred to as a peptide-active agent conjugate or a peptide construct.

[0280] The peptide oligonucleotide complexes of the present disclosure can also be used to deliver another active agent. Peptides according to the present disclosure can be conjugated to, linked to, or fused to an agent for use in the treatment of tumors and cancers or other diseases. For example, in certain embodiments, the peptides described herein are fused or conjugated to another molecule, such as an active agent that provides an additional functional capability. A peptide or nucleotide can be fused with an active agent through expression of a vector containing the sequence of the peptide with the sequence of the active agent. In various embodiments, the sequence of the peptide and the sequence of the active agent can be expressed from the same Open Reading Frame (ORF). In various embodiments, the sequence of the peptide and the sequence of the active agent can comprise a contiguous sequence. The peptide and the active agent can each retain similar functional capabilities in the peptide construct compared with their functional capabilities when expressed separately. In certain embodiments, examples of active agents can include other peptides.

[0281] As another example, in certain embodiments, the peptides or nucleotides described herein are attached to another molecule, such as an active agent that provides a functional capability. The active agent may be any active agent (e.g., therapeutic agent, detectable agent, or binding moiety) described herein. In some embodiments, the peptide or nucleotide is covalently or non-covalently linked to an active agent, e.g., directly or via a linker. Exemplary linkers suitable for use with the embodiments herein are discussed in further detail below.

### Modification of Peptides

[0282] A peptide can be modified (e.g., chemically modified, mutationally modified, or modified with a peptide) in one or more of a variety of ways. In some embodiments, the peptide can be mutated to add function, delete function, or modify the in vivo behavior. One or more loops between the disulfide linkages of a peptide (e.g., a PD-L1-binding peptide or peptide complex) can be modified or replaced to include active elements from other peptides (such as described in Moore and Cochran, Methods in Enzymology, 503, p. 223-251, 2012). In some embodiments, the peptides of the present disclosure (e.g., PD-L1-binding peptides or peptide complexes) can be further functionalized and multimerized by adding an additional functional domain. For example, an albumin-binding domain from a Finegoldia magna peptostreptococcal albumin-binding protein (SEQ ID NO: 245, MKLNKKLLMAALAGAIVVGGGVNTFAADEPGAIKVDKAPEAPSQELKLTKEEAEKAL KKEKPIAKERLRRLGITSEFILNQIDKATSREGLESLVQTIKQSYLKDHPIKEEKTEETPKY NNLFDKHELGGLGKDKGPGRFDENGWENNEHGYETRENAEKAAVKALGDKEINKSYT ISQGVDGRYYYVL SREEAETPKKPEEKKPEDKRPKMTIDQWLLKNAKEDAIAELKKAGI TSDFYFNAINKAKTVEEVNALKNEILKAHAGKEVNPSTPEVTPSVPQNHYHENDYANIG AGEGTKEDGKKENSKEGIKRKTAREEKPGKEEKPAKEDKKENKKKENTDSPNKKKKE KAALPEAGRRKAEILTLAAASLSSVAGAFISLKKRK). For example, an albumin-binding domain of SEQ ID NO: 243 (LKNAKEDAIAELKKAGITSDFYFNAINKAKTVEEVNALKNEILKA) can be added to a peptide of the present disclosure. In some embodiments, a peptide of the present disclosure can be functionalized with an albumin-binding domain that has been modified for improved albumin affinity, improved stability, reduced immunogenicity, improved manufacturability, or a combination thereof. For example, a peptide can be functionalized with a modified albumin-binding domain of SEQ ID NO: 244 (LKEAKEKAIEELKKAGITSDYYFDLINKAKTVEGVNALKDEILKA) having high thermostability and improved serum half-life compared to the albumin binding domain of SEQ ID NO: 243. The albumin-binding domain comprises a simple three-helical structure that would be unlikely to disturb the independent folding of the other peptide domains (e.g., CDP domains). In some embodiments, a functional domain (e.g., an albumin-binding domain) can increase the serum half-life of a peptide or peptide complex of the present disclosure. A functional domain (e.g., an albumin-binding domain) can be included in any orientation relative to the PD-L1-binding peptide. For example, a functional domain can be linked to the PD-L1-binding peptide. An additional functional domain can be linked to one or more peptides (e.g., a PD-L1-binding peptide or peptide complex) via a linker (e.g., a peptide linker of any one of SEQ ID NO: 154-SEQ ID NO: 241 or SEQ ID NO: 433).

[0283] Amino acids of a peptide or a peptide complex (e.g., a PD-L1-binding peptide or peptide complex) can also be mutated, such as to increase half-life, modify, add or delete binding behavior in vivo, add new targeting function, modify surface charge and hydrophobicity, or allow conjugation sites. N-methylation is one example of methylation that can occur in a peptide of the disclosure. In some embodiments, the peptide is modified by methylation on free amines. For example, full methylation can be accomplished through the use of reductive methylation with formaldehyde and sodium cyanoborohydride.

[0284] The peptides can be modified to add function, such as to graft loops or sequences from other proteins or peptides onto peptides of this disclosure. Likewise, domains, loops, or sequences from this disclosure can be grafted onto other peptides or proteins such as antibodies that have additional function.

[0285] In some embodiments, a PD-L1-binding peptide or peptide complex can comprise a tissue targeting domain and can accumulate in the target tissue upon administration to a subject. For example, PD-L1-binding peptides can be conjugated to, linked to, or fused to a molecule (e.g., small molecule, peptide, or protein) with targeting or homing function for a cell of interest or a target protein located on the surface or inside said cell. In some embodiments, PD-L1-binding peptides can be conjugated to, linked to, or fused to a molecule that extends the plasma and/or biological half-life, or modifies the pharmacodynamic (e.g., enhanced binding to a target protein) and/or pharmacokinetic properties (e.g., rate and mode of clearance) of the peptides, or any combination thereof.

[0286] A chemical modification can, for instance, extend the half-life of a peptide or change the biodistribution or pharmacokinetic profile. A chemical modification can comprise a polymer, a polyether, polyethylene glycol, a biopolymer, a polyamino acid, a fatty acid, a dendrimer, an Fc region, a simple saturated carbon chain such as palmitate or myristolate, or albumin. A polyamino acid can include, for example, a poly amino acid sequence with repeated single amino acids (e.g., poly glycine), and a poly amino acid sequence with mixed poly amino acid sequences (e.g., gly-ala-gly-ala (SEQ ID NO: 550)) that can or may not follow a pattern, or any combination of the foregoing.

[0287] The peptides of the present disclosure can be modified such that the modification increases the stability and/or the half-life of the peptides. The attachment of a hydrophobic moiety, such as to the N-terminus, the C-terminus, or an internal amino acid, can be used to extend half-life of a peptide of the present disclosure. The peptides can also be modified to increase or decrease the gut permeability or cellular permeability of the peptide. In some cases, the peptides of the present disclosure show high accumulation in glandular cells of the intestine, demonstrating applicability in the treatment and-or prevention of diseases or conditions of the intestines, such as Crohn's disease or more generally inflammatory bowel diseases. The peptide of the present disclosure can include post-translational modifications (e.g., methylation and/or amidation and/or glycosylation), which can affect, e.g., serum half-life. In some embodiments, simple carbon chains (e.g., by myristoylation and/or palmitylation) can be conjugated to, linked to, the fusion proteins or peptides. The simple carbon chains can render the fusion proteins or peptides easily separable from the unconjugated material. For example, methods that can be used to separate the fusion proteins or peptides from the unconjugated material include, but are not limited to, solvent extraction and reverse phase chromatography. Lipophilic moieties can extend half-life through reversible binding to serum albumin. Conjugated moieties can, e.g., be lipophilic moieties that extend half-life of the peptides through reversible binding to serum albumin. In some embodiments, the lipophilic moiety can be cholesterol or a cholesterol derivative including cholestenes, cholestanes, cholestadienes and oxysterols. In some embodiments, the peptides can be conjugated to, linked to, myristic acid (tetradecanoic acid) or a derivative thereof. In other embodiments, the peptides of the present disclosure can be coupled (e.g., conjugated, linked, or fused) to a half-life modifying agent. Examples of half-life modifying agents can include, but is not limited to: a polymer, a polyethylene glycol (PEG), a hydroxyethyl starch, polyvinyl alcohol, a water soluble polymer, a zwitterionic water soluble polymer, a water soluble poly(amino acid), a water soluble polymer of proline, alanine and serine, a water soluble polymer containing glycine, glutamic acid, and serine, an Fc region, a fatty acid, palmitic acid, albumin, or a molecule that binds to albumin. In some embodiments, the half-life modifying agent can be a serum albumin binding peptide, for example SA21 (SEQ ID NO: 242, RLIEDICLPRWGCLWEDD). In some embodiments, a SA21 peptide can be conjugated or fused to the CDPs of the present disclosure (e.g., any of SEQ ID NO: 1-SEQ ID NO: 118, SEQ ID NO: 435, SEQ ID NO: 436, or SEQ ID NO: 554-SEQ ID NO: 567). Additionally, conjugation of the peptide to a near infrared dye, such as Cy5.5, or to an albumin binder such as Albu-tag can extend serum half-life of any peptide as described herein. In some embodiments, immunogenicity is reduced by using minimal non-human protein sequences to extend serum half-life of the peptide.

[0288] In some embodiments, the first two N-terminal amino acids (GS) of SEQ ID NO: 60-SEQ ID NO: 118, SEQ ID NO: 435, SEQ ID NO: 436, or SEQ ID NO: 554-SEQ ID NO: 567 serve as a spacer or linker in order to facilitate conjugation or fusion to another molecule, as well as to facilitate cleavage of the peptide from such conjugated to, linked to, or fused molecules. In some embodiments, the fusion proteins or peptides of the present disclosure can be conjugated to, linked to, or fused to other moieties that, e.g., can modify or effect changes to the properties of the peptides.

[0289] In some embodiments, peptides or peptide complexes of the present disclosure can also be conjugated to, linked to, or fused to other affinity handles. Other affinity handles can include genetic fusion affinity handles. Genetic fusion affinity handles can include 6×His (HHHHHH (SEQ ID NO: 248); immobilized metal affinity column purification possible), FLAG (DYKDDDDK (SEQ ID NO: 432); anti-FLAG immunoprecipitation), and “shorty” FLAG (DYKDE (SEQ ID NO: 431). In some embodiments, peptides or peptide complexes of the present disclosure can also be conjugated to, linked to, or fused to an expression tag or sequence to improve protein expression and/or purification.

[0290] Additionally, more than one peptide sequence (e.g., a peptide derived from a toxin or venom protein) can be present on, conjugated to, linked to, or fused with a particular peptide. A peptide can be incorporated into a biomolecule by various techniques. A peptide can be incorporated by a chemical transformation, such as the formation of a covalent bond, such as an amide bond. A peptide can be incorporated, for example, by solid phase or solution phase peptide synthesis. A peptide can be incorporated by preparing a nucleic acid sequence encoding the biomolecule, wherein the nucleic acid sequence includes a subsequence that encodes the peptide. The subsequence can be in addition to the sequence that encodes the biomolecule or can substitute for a subsequence of the sequence that encodes the biomolecule.

[0291] A PD-L1-binding peptide of the present disclosure (e.g., any one of SEQ ID NO: 1-SEQ ID NO: 118, SEQ ID NO: 435, SEQ ID NO: 436, or SEQ ID NO: 554-SEQ ID NO: 567) may be modified with a cell penetrating peptide to form a cell penetrating PD-L1-binding peptide. The cell penetrating peptide may facilitate delivery of the PD-L1-binding peptide or peptide complex into a cell or across a cellular layer (e.g., across the blood brain barrier or across the endosome into a cytosol). In some embodiments, a cell penetrating PD-L1-binding peptide may be further complexed with an additional active agent to facilitate delivery of the additional active agent into a cell or across a cellular layer. This may enable delivery of active agents (e.g., therapeutic agents) to intracellular targets. Examples of cell penetrating peptides that may be used in combination with the PD-L1-binding peptides of the present disclosure are provided in TABLE 7.

TABLE 7
Exemplary Cell Penetrating Peptides

| SEQ ID NO | Name | Sequence |
|---|---|---|
| SEQ ID NO: 249 | CysTat | CYRKKRRQRRR |
| SEQ ID NO: 250 | S19-TAT | PFVIGAGVLGALGTGIGGIGRKKRRQRRR |
| SEQ ID NO: 251 | R8 | RRRRRRRR |
| SEQ ID NO: 252 | pAntp | RQIKIWFQNRRMKWKK |
| SEQ ID NO: 253 | Pas-TAT | FFLIPKGGRKKRRQRRR |
| SEQ ID NO: 254 | Pas-R8 | FFLIPKGRRRRRRRR |
| SEQ ID NO: 255 | PasFHV | FFLIPKGRRRRNRTRRNRRRVR |
| SEQ ID NO: 256 | Pas-pAntP | FFLIPKGRQIKIWFQNRRMKWKK |
| SEQ ID NO: 257 | F2R4 | FFRRRR |
| SEQ ID NO: 258 | B55 | KAVLGATKIDLPVDINDPYDLGLLLRHLRHHS |
| | | NLLANIGDPAVREQVLSAMQEEE |
| SEQ ID NO: 259 | auzurin | LSTAADMQGVVTDGMASGLDKDYLKPDD |
| SEQ ID NO: 260 | IMT-P8 | RRWRRWNRFNRRRCR |
| SEQ ID NO: 261 | BR2 | RAGLQFPVGRLLRRLLR |
| SEQ ID NO: 262 | OMOTAG1 | KRAHHNALERKRR |
| SEQ ID NO: 263 | OMOTAG2 | RRMKANARERNRM |
| SEQ ID NO: 264 | pVEC | LLIILRRRIRKQAHAHSK |
| SEQ ID NO: 265 | SynB3 | RRLSYSRRRF |
| SEQ ID NO: 266 | DPV1047 | VKRGLKLRHVRPRVTRMDV |
| SEQ ID NO: 267 | CY105Y | CSIPPEVKFNKPFVYLI |
| SEQ ID NO: 268 | Transportan | GWTLNSAGYLLGKINLKALAALAKKIL |
| SEQ ID NO: 269 | MTS | KGEGAAVLLPVLLAAPG |
| SEQ ID NO: 270 | hLF | KCFQWQRNMRKVRGPPVSCIKR |
| SEQ ID NO: 271 | PFVYLI | PFVYLI |
| SEQ ID NO: 272 | yBBR | VLDSLEFIASKL |
| SEQ ID NO: 273 | DRI-TAT31 | rrrqrrkkrgy |
| SEQ ID NO: 274 | cyclic | FΦRRRRQ |
| | heptapeptide | |
| | cyclo | |
| SEQ ID NO: 275 | Argₙ | Argₙ wherein n is a whole number |
| | | and can be 2, 3, 4, 5, 6, 7, 8, |
| | | 9, or 10 |
| SEQ ID NO: 276 | Tat peptide | YGRKKRRQRRR |
| SEQ ID NO: 277 | | GRKKRRQRRR |
| SEQ ID NO: 278 | | GRKKRRQRRRPQ |
| SEQ ID NO: 279 | DPV3 | RKKRRRESRKKRRRES |
| SEQ ID NO: 280 | C10H | RKGFYKRKQCKPSRGRKR |
| SEQ ID NO: 281 | VP22 | NAATATRGRSAASRPTQRPRAPARSASRPRRP |
| | | VQ |
| SEQ ID NO: 282 | TP10 | AGYLLGKINLKALAALAKKIL |
| SEQ ID NO: 283 | MAP | KLALKLALKALKAALKLA |
| SEQ ID NO: 284 | BPrPp | MVKSKIGSWILVLFVAMWSDVGLCKKRP |
| SEQ ID NO: 285 | ARF | MVRRFLVTLRIRRACGPPRVRV |
| SEQ ID NO: 286 | GALA | WEAALAEALAEALAEHLAEALAEALEALAA |
| SEQ ID NO: 287 | SAP | VRLPPPVRLPPPVRLPPP |
| SEQ ID NO: 288 | MPG | GLAFLGFLGAAGSTMGAWSQPKKKRKV |
| SEQ ID NO: 289 | Pep-1 | KETWWETWWTEWSQPKKKRKV |
| SEQ ID NO: 290 | [WR]4 | WRWRWRWR |
| SEQ ID NO: 291 | Ig(v) | MGLGLHLLVLAAALQGAKKKRKV |
| SEQ ID NO: 292 | K-FGF | AAVALLPAVLLAHLLAP |
| SEQ ID NO: 293 | Melittin | GIGAVLKVLTTGLPALISWIKRKRQQ |
| SEQ ID NO: 294 | gH625 | HGLASTLTRWAHYNALIRAF |
| SEQ ID NO: 295 | HIV-1 TAT | GRKKRRQRRRPPQ |
| | protein (48-60) | |
| SEQ ID NO: 296 | MPG HIV- | GALFLGFLGAAGSTMGAWSQPKKKRKV |
| | gp41/SV40 | |
| | T-antigen | |
| SEQ ID NO: 297 | R6W3 | RRWWRRWRR |
| SEQ ID NO: 298 | NLS | CGYGPKKKRKVGG |
| SEQ ID NO: 299 | 8-lysines | KKKKKKKK |
| SEQ ID NO: 300 | HRSV | RRIPNRRPRR |
| SEQ ID NO: 301 | AIP6 | RLRWR |
| SEQ ID NO: 302 | Pep-1 | KETWWETWWTEWSQPKKRKV |
| SEQ ID NO: 303 | MAP17 | QLALQLALQALQAALQLA |
| SEQ ID NO: 304 | VT5 | DPKGDPKGVTVTVTVTVTGKGDPKPD |
| SEQ ID NO: 305 | Bac7 | RRIRPRPPRLPRPRPRPLPFPRPG |
| SEQ ID NO: 306 | (PPR)n | PPRPPRPPR |
| SEQ ID NO: 307 | | PPRPPRPPRPPR |
| SEQ ID NO: 308 | | PPRPPRPPRPPRPPR |
| SEQ ID NO: 309 | | PPRPPRPPRPPRPPRPPR |
| SEQ ID NO: 310 | INF7 | GLFEAIEGFIENGWEGMIDGWYGC |
| SEQ ID NO: 311 | CADY | GLWRALWRLLRSLWRLLWRA |
| SEQ ID NO: 312 | Pep-7 | SDLWEMMMVSLACQY |
| SEQ ID NO: 313 | TGN | TGNYKALHPHNG |
| SEQ ID NO: 314 | Ku-70 | VPMLK |
| SEQ ID NO: 315 | CPP | RRRRRRGGRRRRRG |
| | (RRRRRRGGRR | |
| | RRRG) | |
| SEQ ID NO: 316 | SVS-1 | KVKVKVKVDPPTKVKVKVK |
| SEQ ID NO: 317 | L-CPP | LAGRRRRRRRRRK |
| SEQ ID NO: 318 | RLW | RLWMRWYSPRTRAYG |
| SEQ ID NO: 319 | K16ApoE | KKKKKKKKKKKKKKKKLRVRLASHLRKLRK |
| | | RLLRDA |
| SEQ ID NO: 320 | Angiopep-2 | TFFYGGSRGKRNNFKTEEY |
| SEQ ID NO: 321 | ACPP | EEEEEEEEPLGLAGRRRRRRRRN |
| SEQ ID NO: 322 | KAFAK | KAFAKLAARLYRKALARQLGVAA |
| SEQ ID NO: 323 | hCT (9-32) | LGTYTQDFNKFHTFPQTAIGVGAP |
| SEQ ID NO: 324 | VP22(version2) | DAATATRGRSAASRPTQRPRAPARSASRPRRP |
| | | VE |
| SEQ ID NO: 325 | MPG | GALFLGFLGAAGSTMGAWSQPKSKRKV |
| SEQ ID NO: 326 | hPP3 | KPKRKRRKKKGHGWSR |
| SEQ ID NO: 327 | PepNeg | SGTQEEY |
| SEQ ID NO: 328 | CPP | RRRRRGGRRRRRG |
| | (RRRRRGGRRR | |
| | RRG) | |
| SEQ ID NO: 329 | CM18-TAT | KWKLFKKIGAVLKVLTTG |
| SEQ ID NO: 330 | PTD4 | YARAAARQARA |
| SEQ ID NO: 331 | WaTx | MKYFTLALTLLFLLLINPCKDMNFAWAESSEK |
| | | VERASPQQAKYCYEQCNVNKVPFDQCYQMC |
| | | SPLERS |
| SEQ ID NO: 332 | maurocaline | GDCLPHLKLCKENKDCCSKKCKRRGTNIEKR |
| | | CR |
| SEQ ID NO: 333 | imperatoxin | GDCLPHLKRCKADNDCCGKKCKRRGTNAEK |
| | | RCR |
| SEQ ID NO: 334 | hadrucalcin | SEKDCIKHLQRCRENKDCCSKKCSRRGTNPEK |
| | | RCR |
| SEQ ID NO: 335 | hemicalcin | GDCLPHLKLCKADKDCCSKKCKRRGTNPEKR |
| | | CR |
| SEQ ID NO: 336 | opicalcin-1 | GDCLPHLKRCKENNDCCSKKCKRRGTNPEKR |
| | | CR |
| SEQ ID NO: 337 | opicalcin-2 | GDCLPHLKRCKENNDCCSKKCKRRGANPEKR |
| | | CR |
| SEQ ID NO: 338 | midkine (62-104) | CKYKFENWGACDGGTGTKVRQGTLKKARYN |
| | | AQCQETIRVTKPC |
| SEQ ID NO: 339 | MCoTI-II | SGSDGGVCPKILKKCRRDSDCPGACICRGNGY |
| | | CG |
| SEQ ID NO: 340 | chlorotoxin | MCMPCFTTDHQMARKCDDCCGGKGRGKCYG |
| | | PQCLCR |
| SEQ ID NO: 341 | calcin | MLICLF |

[0292] In some embodiments, a tissue targeting domain can comprise a transferrin receptor-binding (TfR-binding) peptide, such as SEQ ID NO: 350 (REGCASRCMKYNDELEKCEARMMSMSNTEEDCEQELEDLLYCLDHCHSQ), which can promote transcytosis across the blood-brain barrier and deliver the PD-L1-binding peptide to the central nervous system including brain tumors. In some embodiments, a TfR-binding peptide may be derived from a scaffold of SEQ ID NO: 351 (REGCASHCTKYKAELEKCEARVSSRSNTEETCVQELFDFLHCVDHCVSQ) or SEQ ID NO: 352 (GSREGCASHCTKYKAELEKCEARVSSRSNTEETCVQELFDFLHCVDHCVSQ). For example, CNS access via transcytosis across the BBB may be performed by binding a PD-L1-binding peptide complexed with a TfR-binding peptide to transferrin receptor (TfR) followed by recycling the complex to the cell surface. Some of the PD-L1-binding peptide/TfR-binding peptide complexes may access low pH early endosomes. The PD-L1-binding peptide or an additional active agent complex may be exposed to endosome upon endocytosis of TfR and may remain and not be degraded due to stability of the PD-L1-binding peptide. If the PD-L1-binding peptide/TfR-binding peptide complex includes additional cell penetration capabilities, the peptide may facilitate accelerated escape of the PD-L1-binding peptide or additional active agent from the endosomal compartment into the cytosol. Even without added cell penetration capabilities, the PD-L1-binding peptide or additional active agent may slowly leak out of endosomes and access the cytosol.

### Nucleotide Modifications

[0293] In some embodiments, the nucleic acid portion of a peptide oligonucleotide complex (e.g., an oligonucleotide of a PD-L1-binding peptide oligonucleotide complex) contains one or more bases within the nucleic acid molecule that are modified. Such modifications can occur whether the nucleic acid portion a single stranded (ssDNA, ssRNA) or double stranded (dsDNA, dsRNA) or a combination of single and double stranded (for example with a mismatched sequence, hairpin or other structure), an antisense RNA, complementary RNA, inhibitory RNA, interfering RNA, nuclear RNA, antisense oligonucleotide (ASO), microRNA (miRNA), an oligonucleotide complementary to a natural antisense transcripts (NATs) sequences, siRNA, snRNA, aptamer, gapmer, anti-miR, splice blocker ASO, or U1 Adapter. One or more bases in a given nucleotide sequence may be modified to increase in vivo stability, to increase resistance to enzymes such as nucleases, increase protein binding including to serum proteins, increase in vivo half-life, to modify the tissue biodistribution, or to modify how the immune system responds. The phosphonate, the ribose, or the base may be modified. In some aspects, the modification comprises a phosphorothioate modification, a phosphodiester modification, a thio-phosphoramidate modification, a methyl phosphonate modification, a phosphorodithioate modification, a methoxypropylphosphonate modification, a 5′-(E)-vinylphosphonate modification, a 5′methyl phosphonate modification, an (S)-5′-C-methyl with phosphate modification, a 5′-phosphorothioate modification, a peptide nucleic acid (PNA), a 2′-O methyl modification, a 2′-O-methoxyethyl (2′-O-Me) modification, a 2′-fluoro (2′-F) modification, a 2′-deoxy-2′-fluoro modification, a 2′arabino-fluor modification, a 2′-O-benyzl modification, a 2′-O-methyl-4-pyridine modification, a locked nucleic acid (LNA), an amino-LNA, a thio-LNA, an ENA, an amino ENA, a carbo-ENA, a (S)-cEt-bridged nucleic acid, an (S)-MOE, a bridged nucleic acid, a tricyclo-DNA, a morpholino nucleic acid (PMO), an unlocked nucleic acid (UNA), a glycol nucleic acid (GNA), a bridged nucleic acid (BNA), an ethyl (S)-cEt nucleic acid, a pseudouridine, a 2′-thiouridine, an N6′methyadenosine, a 5′-methylcytidine, a 5′-fluoro-2′-deoxyuridine, a N′ethylpiperidine 7′-EAA triazole modified adenine, an N-ethylpiperidine 6′-triazole modified adenine, a 6′-phenylpyrrolocytosine, a 2′,4′-difluorotoluyl ribonucleoside, a 5′nitroindole, a 5′ methyl, a 5′ phosphonate, an inverted A base, a 2′-H (deoxyribose), a 2′-OH (ribose), or any combination thereof. The oligonucleotide may be comprised entirely of a combination of 2′-O-Me and 2′-F modifications. Diastereomers or one or both stereoisomers may be used. Any of the stabilization chemistries or patterns, including STC, ESC, advanced, ESC, AD1-3, AD5, disclosed in Hu Signal Transduction and Targeted Therapy 2020,5:101 can be used. Pyrimidines can be 2′-fluoro-modified, which can increase stability to nucleases but can also increase immune system activation. The RNA backbone can be phosphorothioate-substituted (where the non-bridging oxygen is replaced with sulfur), which can increase resistance to nuclease digestion as well as altering the biodistribution and tissue retention and increasing the pharmacokinetics such as by increasing protein binding, but can also induce more immune stimulation. Methyl phosphonate modification of an RNA can also be used. 2′-Omethyl and 2′-F RNA bases can be used, which can protect against base hydrolysis and nucleases and increase the melting temperature of duplexes. Bridged, Locked, and other similar forms of Bridged Nucleic Acids (BNA, LNA, cEt) where any chemical bridge such as an N—O linkage between the 2′ oxygen and 4′ carbons in ribose can be incorporated to increase resistance to exo- and endonucleases and enhance biostability. These include BNA where an N—O linkage between the 2′ and 4′ carbons occur and where any chemical modification of the nitrogen (including but not limited to N—H, N—CH3, N-benzene) in the bridge can be added to increase stability RNA backbone or base modifications can be placed anywhere in the RNA sequence, at one, multiple, or all base locations. Optionally, phosophorothioate nucleic acid linkages may be used between the 2-4 terminal nucleic acids of one or both sequences. Optionally 2′F modified nucleic acids may be used at least at 2-4 positions, at least 5%, at least 10% at least 25% of internal positions, at least 50%, at least 75%, or up to 100% of internal positions, all internal positions or all positions. Optionally, one or more of 2′F base, an LNA base, a BNA base, an ENA base, a 2′O-MOE base, a morpholino base, a 2′OMe base, a 5′-Me base, a (S)-cEt base or combinations thereof may be used at least at 2-4 positions, at least 5%, at least 10% at least 25% of internal positions, at least 50%, at least 75%, or up to 100% of internal positions, all internal positions or all positions.

[0294] Modified bases can be used to increase in the in vivo half-life of the oligonucleotide. They can allow the oligonucleotide to remaining intact in the serum, endosome, cytosol, or nucleus, including for days, weeks, or months. This can allow ongoing activity, including if the oligonucleotide is slowly released from the endosome over days, weeks, or months within a given cell (such as described in Brown et al., Nucleic Acids Research, 2020, p 11827-11844).

[0295] In some embodiments, a nucleotide comprises at least one phosphorothioate linkage. In some embodiments, a peptide oligonucleotide complex comprises from 1 to 12 phosphorothioate linkages. In some embodiments, a nucleotide comprises at least one thiophosphoroamidate linkage. In some embodiments, a nucleotide comprises from 1 to 12 thiophosphoroamidate linkages. In some embodiments, a nucleotide comprises at least one modified base. In some embodiments, at least modified base comprises a 2′F base, an LNA base, a BNA base, an ENA base, a 2′O-MOE base, a 5′-Me base, a (S)-cEt base, a 2′OMe base, a morpholino base, or combinations thereof.

### Linkers

[0296] Peptides according to the present disclosure (e.g., PD-L1-binding peptides or peptide complexes) can be attached to another moiety (e.g., an additional active agent), such as a small molecule, a second peptide, a second CDP, a protein, a miniprotein, an antibody, an antibody fragment, an Fc, an Fc knob, an Fc hole, an aptamer, polypeptide, polynucleotide, a fluorophore, a radioisotope, a radionuclide chelator, a polymer, a biopolymer, a fatty acid, an acyl adduct, a chemical linker, a binding moiety, or sugar or other active agent or detectable agent described herein through a linker, or directly in the absence of a linker. In the absence of a linker, for example, an active agent or a detectable agent can be conjugated to, linked to, or fused to the N-terminus or the C-terminus of a peptide to create an active agent or detectable agent fusion peptide. In other embodiments, the link can be made by a peptide fusion via reductive alkylation. In some embodiments, a cleavable linker is used for in vivo delivery of the peptide, such as a linker that can be cleaved or degraded upon entry in a cell, endosome, or a nucleus. In some embodiments, in vivo delivery of a peptide requires a small linker that does not interfere with penetration of a cell or localization to a nucleus of a cell. A linker can also be used to covalently attach a peptide as described herein to another moiety or molecule having a separate function, such a targeting, cytotoxic, therapeutic, homing, imaging, or diagnostic functions.

[0297] A peptide can be directly attached to another molecule by a covalent attachment. For example, the peptide is attached to a terminus of the amino acid sequence of a larger polypeptide or peptide molecule, or is attached to a side chain, such as the side chain of a lysine, serine, threonine, cysteine, tyrosine, aspartic acid, a non-natural amino acid residue, or glutamic acid residue. The attachment can be via an amide bond, an ester bond, an ether bond, a carbamate bond, a carbon-nitrogen bond, a triazole, a macrocycle, an oxime bond, a hydrazone bond, a carbon-carbon single double or triple bond, a disulfide bond, or a thioether bond. In some embodiments, similar regions of the disclosed peptide(s) itself (such as a terminus of the amino acid sequence, an amino acid side chain, such as the side chain of a lysine, serine, threonine, cysteine, tyrosine, aspartic acid, a non-natural amino acid residue, or glutamic acid residue, via an amide bond, an ester bond, an ether bond, a carbamate bond, a carbon-nitrogen bond, a triazole, a macrocycle, an oxime bond, a hydrazone bond, a carbon-carbon single double or triple bond, a disulfide bond, or a thioether bond, or linker as described herein) can be used to link other molecules.

[0298] Attachment via a linker can involve incorporation of a linker moiety between the other molecule and the peptide. The peptide and the other molecule can both be covalently attached to the linker. The linker can be cleavable, labile, non-cleavable, stable, stable self-immolating, hydrophilic, or hydrophobic. As used herein, the term “non-cleavable” or “stable” (such as used in association with an amide, cyclic, or carbamate linker or as otherwise as described herein) is often used by a skilled artisan to distinguish a relatively stable structure from one that is more labile or “cleavable” (e.g., as used in association with cleavable linkers that may be dissociated or cleaved structurally by enzymes, proteases, self-immolation, pH, reduction, hydrolysis, certain physiologic conditions, or as otherwise described herein). It is understood that “non-cleavable” or “stable” linkers offer stability against cleavage or other dissociation as compared to “cleavable” linkers, and the term is not intended to be considered an absolute non-cleavable or non-dissociative structure under any conditions. Consequently, as used herein, a “non-cleavable” linker is also referred to as a “stable” linker. The linker can have at least two functional groups with one bonded to the peptide, the other bonded to the other molecule, and a linking portion between the two functional groups. Some example linkers are described in Jain, N., Pharm Res. 32(11): 3526-40 (2015), Doronina, S. O., Bioconj Chem. 19(10): 1960-3 (2008), Pillow, T. H., J Med Chem. 57(19): 7890-9 (2014), Dorywalksa, M., Bioconj Chem. 26(4): 650-9 (2015), Kellogg, B. A., Bioconj Chem. 22(4): 717-27 (2011), and Zhao, R. Y., J Med Chem. 54(10): 3606-23 (2011).

[0299] Non-limiting examples of the functional groups for attachment can include functional groups capable of forming an amide bond, an ester bond, an ether bond, a carbonate bond, a carbamate bond, or a thioether bond. Non-limiting examples of functional groups capable of forming such bonds can include amino groups; carboxyl groups; hydroxyl groups; aldehyde groups; azide groups; alkyne and alkene groups; ketones; hydrazides; acid halides such as acid fluorides, chlorides, bromides, and iodides; acid anhydrides, including symmetrical, mixed, and cyclic anhydrides; carbonates; carbonyl functionalities bonded to leaving groups such as cyano, succinimidyl, and N-hydroxysuccinimidyl; hydroxyl groups; sulfhydryl groups; and molecules possessing, for example, alkyl, alkenyl, alkynyl, allylic, or benzylic leaving groups, such as halides, mesylates, tosylates, triflates, epoxides, phosphate esters, sulfate esters, and besylates.

[0300] Non-limiting examples of the linking portion can include alkylene, alkenylene, alkynylene, polyether, such as polyethylene glycol (PEG), hydroxy carboxylic acids, polyester, polyamide, polyamino acids, polypeptides, cleavable peptides, valine-citrulline, aminobenzylcarbamates, D-amino acids, and polyamine, any of which being unsubstituted or substituted with any number of substituents, such as halogens, hydroxyl groups, sulfhydryl groups, amino groups, nitro groups, nitroso groups, cyano groups, azido groups, sulfoxide groups, sulfone groups, sulfonamide groups, carboxyl groups, carboxaldehyde groups, imine groups, alkyl groups, halo-alkyl groups, alkenyl groups, halo-alkenyl groups, alkynyl groups, halo-alkynyl groups, alkoxy groups, aryl groups, aryloxy groups, aralkyl groups, arylalkoxy groups, heterocyclyl groups, acyl groups, acyloxy groups, carbamate groups, amide groups, urethane groups, epoxides, and ester groups.

[0301] In some cases, a linker can comprise a triazole group, such as any one of the heterocyclic compounds with molecular formula C₂H₃N₃, having a five-membered ring of two carbon atoms and three nitrogen atoms, optionally with a hydrogen atom bonded to N at any position in the ring, such as:

[chemical structure]

for example, a 1, 2, 3-Triazole (such as 1H1,2,3-Triazole, 2H1,2,3-Triazole, or 1-methyl-4,5,6,7,8,9-hexahydro-1H-cycloocta[d][1,2,3]triazole) or a 1,2,4-Triazole (such as 1H1,2,4-Triazole or 4H1,2,4-Triazole).

[0302] Additional non-limiting examples of linkers include linear or non-cyclic linkers such as:

[chemical structure]

wherein each n is independently 0 to about 1,000; 1 to about 1,000; 0 to about 500; 1 to about 500; 0 to about 250; 1 to about 250; 0 to about 200; 1 to about 200; 0 to about 150; 1 to about 150; 0 to about 100; 1 to about 100; 0 to about 50; 1 to about 50; 0 to about 40; 1 to about 40; 0 to about 30; 1 to about 30; 0 to about 25; 1 to about 25; 0 to about 20; 1 to about 20; 0 to about 15; 1 to about 15; 0 to about 10; 1 to about 10; 0 to about 5; or 1 to about 5. In some embodiments, each n is independently 0, about 1, about 2, about 3, about 4, about 5, about 6, about 7, about 8, about 9, about 10, about 11, about 12, about 13, about 14, about 15, about 16, about 17, about 18, about 19, about 20, about 21, about 22, about 23, about 24, about 25, about 26, about 27, about 28, about 29, about 30, about 31, about 32, about 33, about 34, about 35, about 36, about 37, about 38, about 39, about 40, about 41, about 42, about 43, about 44, about 45, about 46, about 47, about 48, about 49, or about 50. In some embodiments, m is 1 to about 1,000; 1 to about 500; 1 to about 250; 1 to about 200; 1 to about 150; 1 to about 100; 1 to about 50; 1 to about 40; 1 to about 30; 1 to about 25; 1 to about 20; 1 to about 15; 1 to about 10; or 1 to about 5. In some embodiments, m is 0, about 1, about 2, about 3, about 4, about 5, about 6, about 7, about 8, about 9, about 10, about 11, about 12, about 13, about 14, about 15, about 16, about 17, about 18, about 19, about 20, about 21, about 22, about 23, about 24, about 25, about 26, about 27, about 28, about 29, about 30, about 31, about 32, about 33, about 34, about 35, about 36, about 37, about 38, about 39, about 40, about 41, about 42, about 43, about 44, about 45, about 46, about 47, about 48, about 49, or about 50, or any linker as disclosed in Jain, N., Pharm Res. 32(11): 3526-40 (2015) or Ducry, L., Antibody Drug Conjugates (2013).

[0303] In some cases, a linker can comprise a cyclic group, such as an organic nonaromatic or aromatic ring, optionally with 3-10 carbons in the ring, optionally built from a carboxylic acid,

[chemical structure]

for example trans-4-(aminomethyl) cyclohexane carboxylic acid,

[chemical structure]

or a substituted analog or a stereoisomer thereof. This linker can optionally be used to form a carbamate linkage. In some cases, a carbamate linkage can be more resistant to cleavage, such as by hydrolysis, enzymes such as esterases, or other chemical reactions, than an ester linkage.

[0304] In some cases, a linker can comprise a cyclic carboxylic acid, for example a cyclic dicarboxylic acid, for example one of the following groups: 1,4-cyclohexane dicarboxylic acid, 1,2-cyclohexane dicarboxylic acid, or 1,3-cyclohexane dicarboxylic acid, 1,1-cyclopentanediacetic acid,

[chemical structure]

or a substituted analog or a stereoisomer thereof. For example, the linker can comprise one of the following groups.

[chemical structure]

In some instances, the linker can optionally be used to form an ester linkage. In some cases, a cyclic ester linkage can be more sterically resistant to cleavage, such as by hydrolysis by water, enzymes such as esterases, or other chemical reactions, than a noncyclic or linear ester linkage.

[0305] In some cases, a linker can comprise an aromatic dicarboxylic acid, for example terephthalic acid, isophthalic acid, phthalic acid

[chemical structure]

or a substituted analog thereof.

[0306] In some cases, a linker can comprise a natural or non-natural amino acid, for example cysteine,

[chemical structure]

or a substituted analog or a stereoisomer thereof. In some instances, a linker can comprise alanine (A, Ala); arginine (R, Arg); asparagine (N, Asn); aspartic acid (D, Asp); glutamic acid (E, Glu); glutamine (Q, Gln); glycine (G, Gly); histidine (H, His); isoleucine (I, Ile); leucine (L, Leu); lysine (K, Lys); methionine (M, Met); phenylalanine (F, Phe); proline (P, Pro); serine (S, Ser); threonine (T, Thr); tryptophan (W, Trp); tyrosine (Y, Tyr); valine (V, Val); or any plurality or combination thereof. In some embodiments, the non-natural amino acid can comprise one or more functional groups, e.g., alkene or alkyne, that can be used as functional handles.

[0307] In some cases, a linker can comprise one of the following groups:

[chemical structure]

or a substituted analog or a stereoisomer thereof. In some instances the linker is selected from one of the following groups:

[chemical structure]

or a substituted analog or a stereoisomer thereof.

[0308] In some cases, a linker can comprise one of the following groups:

[chemical structure]

or a substituted analog or a stereoisomer thereof. In some instances, the linker is selected from one of the following groups:

[chemical structure]

or a substituted analog or a stereoisomer thereof.

[0309] In some cases, a substituted analog or a stereoisomer is a structural analog of a compound disclosed herein, for which one or more hydrogen atoms of the compound can be substituted by one or more groups of halo (e.g., Cl, F, Br), alkyl (e.g., methyl, ethyl, propyl), alkenyl, alkynyl, arylalkyl, cycloalkyl, cycloalkylalkyl, heteroalkyl, heterocycloalkyl, or any combination thereof. In some cases, a stereoisomer can be an enantiomer, a diastereomer, a cis or trans stereoisomer, a E or Z stereoisomer, or a R or S stereoisomer.

[0310] Non-limiting examples of linear linkers include;

[chemical structure]

wherein each n1, or n2 or m is independently 0 to about 1,000; 1 to about 1,000; 0 to about 500; 1 to about 500; 0 to about 250; 1 to about 250; 0 to about 200; 1 to about 200; 0 to about 150; 1 to about 150; 0 to about 100; 1 to about 100; 0 to about 50; 1 to about 50; 0 to about 40; 1 to about 40; 0 to about 30; 1 to about 30; 0 to about 25; 1 to about 25; 0 to about 20; 1 to about 20; 0 to about 15; 1 to about 15; 0 to about 10; 1 to about 10; 0 to about 5; or 1 to about 5. In some embodiments, each n is independently 0, about 1, about 2, about 3, about 4, about 5, about 6, about 7, about 8, about 9, about 10, about 11, about 12, about 13, about 14, about 15, about 16, about 17, about 18, about 19, about 20, about 21, about 22, about 23, about 24, about 25, about 26, about 27, about 28, about 29, about 30, about 31, about 32, about 33, about 34, about 35, about 36, about 37, about 38, about 39, about 40, about 41, about 42, about 43, about 44, about 45, about 46, about 47, about 48, about 49, or about 50. In some embodiments, m is 1 to about 1,000; 1 to about 500; 1 to about 250; 1 to about 200; 1 to about 150; 1 to about 100; 1 to about 50; 1 to about 40; 1 to about 30; 1 to about 25; 1 to about 20; 1 to about 15; 1 to about 10; or 1 to about 5. In some embodiments, m is 0, about 1, about 2, about 3, about 4, about 5, about 6, about 7, about 8, about 9, about 10, about 11, about 12, about 13, about 14, about 15, about 16, about 17, about 18, about 19, about 20, about 21, about 22, about 23, about 24, about 25, about 26, about 27, about 28, about 29, about 30, about 31, about 32, about 33, about 34, about 35, about 36, about 37, about 38, about 39, about 40, about 41, about 42, about 43, about 44, about 45, about 46, about 47, about 48, about 49, or about 50. In some instances, the linker can comprise a linear dicarboxylic acid, e.g., one of the following groups: succinic acid, 2,3-dimethylsuccinic acid, glutaric acid, adipic acid, 2,5-dimethyladipic acid,

[chemical structure]

or a substituted analog or a stereoisomer thereof. In some cases, the linker can be used to form a carbamate linkage. In some embodiments, the carbamate linkage can be more resistant to cleavage, such as by hydrolysis, enzymes such as esterases, or other chemical reactions, than an ester linkage. In some cases, the linker can be used to form a linear ester linkage. In some embodiments, the linear ester linkage can be more susceptible to cleavage, such as by hydrolysis, enzymes such as esterases, or other chemical reactions, than a cyclic ester or carbamate linkage. Side chains such as methyl groups on the linear ester linkage can optionally make the linkage less susceptible to cleavage than without the side chains.

[0311] In some cases a linker can be a succinic linker, and a targeting agent (e.g., a single stranded (ssDNA, ssRNA) or double stranded (dsDNA, dsRNA) or a combination of single and double stranded (for example with a mismatched sequence, hairpin or other structure), an antisense RNA, complementary RNA, inhibitory RNA, interfering RNA, nuclear RNA, antisense oligonucleotide (ASO), microRNA (miRNA), an oligonucleotide complementary to a natural antisense transcripts (NATs) sequences, siRNA, snRNA, aptamer, gapmer, anti-miR, splice blocker ASO, or U1 Adapter) or other active agent or detectable agent can be attached to a peptide via an ester bond or an amide bond with two methylene carbons in between. In other cases, a linker can be any linker with both a hydroxyl group and a carboxylic acid, such as hydroxy hexanoic acid or lactic acid.

[0312] In some cases, a nucleotide (e.g., a single stranded (ssDNA, ssRNA) or double stranded (dsDNA, dsRNA) or a combination of single and double stranded (for example with a mismatched sequence, hairpin or other structure), an antisense RNA, complementary RNA, inhibitory RNA, interfering RNA, nuclear RNA, antisense oligonucleotide (ASO), microRNA (miRNA), an oligonucleotide complementary to a natural antisense transcripts (NATs) sequences, siRNA, snRNA, aptamer, gapmer, anti-miR, splice blocker ASO, or U1 Adapter), an active agent, or a detectable agent can be attached to a peptide using any one or more of the linkers shown below in TABLE 8. In some embodiments, a peptide, an additional active agent, or a detectable agent can be attached to a nucleotide any one or more of the linkers shown below in TABLE 8.

TABLE 8
Exemplary Linkers for Use in Peptide Conjugates or Complexes

| Compound | | |
|---|---|---|
| number | Chemical structure | Linker is based on: |
| 1 | [chemical structure] | Carbonic acid |
| 2 | [chemical structure] | trans-1,4- cyclohexanedicarboxylic acid |
| 3 | [chemical structure] | 1,4-cyclohexanedicarboxylic acid |
| 4 | [chemical structure] | trans-1-aminomethylamine- cyclohexane-4-carboxylic acid (carbamate) |
| 5 | [chemical structure] | 1-aminomethylamine- cyclohexane-4-carboxylic acid |
| 6 | [chemical structure] | 4-(carboxyoxy)-methyl- cyclohexane-1-carboxylic acid |
| 7 | [chemical structure] | 4-(carboxyamino)- cyclohexane-1-carboxylic acid |
| 8 | [chemical structure] | trans-4-(carboxyamino)- cyclohexane-1-carboxylic acid |
| 9 | [chemical structure] | 4-(carboxyamino)benzoic acid |
| 10 | [chemical structure] | 4-(carboxyoxy)benzoic acid |
| 11 | [chemical structure] | 2-(4- (carboxyoxy)phenyl)acetic acid |
| 12 | [chemical structure] | 4- ((carboxyoxy)methyl)benzoic acid |
| 13 | [chemical structure] | 2,2′-(cyclopentane-1,1- diyl)diacetic acid |
| 14 | [chemical structure] | cis-5-norborene-endo-2,3- dicarboxylic acid |
| 15 | [chemical structure] | (3-amino-3- oxypropyl)carbamic acid |
| 16 | [chemical structure] | [¹⁴C]-Cysteine |
| 17 | [chemical structure] | Cysteine |
| 18 | [chemical structure] | Succinic acid |
| 19 | [chemical structure] | Glutaric acid |
| 20 | [chemical structure] | Adipic acid |
| 21 | [chemical structure] | 2,5-dimethyladipic acid (DMA) |
| 22 | [chemical structure] | trans-β-hydromuconic acid |
| 23 | [chemical structure] | 1,4-dimethyl-1H-1,2,3-triazole |
| 24 | [chemical structure] | 1,5-dimethyl-1H-1,2,3-triazole |
| 25 | [chemical structure] | 1-methyl-4,5,6,7,8,9- hexahydro-1H- cycloocta[d][1,2,3]triazole |
| 26 | [chemical structure] | 1,5-dimethyl-1H-1,2,4-triazole |
| 27 | [chemical structure] | 1,3-dimethyl-1H-1,2,4-triazole |

[0313] In some cases, an active agent is attached to a linker wherein a nucleophilic functional group (e.g., a hydroxyl group) of the active agent molecule acts as the nucleophile and replaces a leaving group on the linker moiety, thereby attaching it to the linker.

[0314] In other cases, an active agent is attached to a linker wherein a nucleophilic functional group (e.g., thiol group, amine group, etc.) of the linker replaces a leaving group on the active agent, thereby attaching it to the linker. Such leaving group (or functional group that may be converted into a leaving group) may be a primary alcohol to form a thioether bond, thereby attaching it to the linker. A primary alcohol can be converted into a leaving group such as a mesylate, a tosylate, or a nosylate in order to accelerate the nucleophilic substitution reaction.

[0315] The peptide-active agent complexes of the present disclosure (e.g., PD-L1-binding peptide complexes) can comprise an active agent (e.g., a therapeutic agent, a detectable agent, or an immune cell binding moiety), a linker, and/or a peptide of the present disclosure. A general connectivity between these three components can be active agent-linker-peptide, such that the linker is attached to both the active agent and the peptide. In many cases, the peptide is attached to a linker via an amide bond. Amide bonds can be relatively stable (e.g., in vivo) compared to other bonds described herein, such as esters, carbonates, etc. The amide bond between the peptide and the linker may thus provide advantageous properties due to its in vivo stability of the active agent is sought to be cleaved from a peptide-active agent-conjugate without the linker being attached to the active agent after such in vivo cleavage. Thus, in various cases, an active agent is attached to the linker-peptide moiety via linkages such as ester, carbonate, carbamate, etc., wherein the peptide or active agent is attached to the linker via an amide bond. This can allow for selective cleavage of the active agent-linker bond (as opposed to the linker-peptide bond) allowing the active agent to be released without a linker moiety attached to it after cleavage. The use of such different active agent-linker bonds or linkages can allow the modulation of active agent release in vivo, e.g., in order to achieve a therapeutic function while minimizing off-target effects (e.g., reduction in drug release during circulation).

[0316] The linker can be a cleavable or a stable linker. The use of a cleavable linker permits release of the conjugated moiety (e.g., a nucleotide targeting agent, a therapeutic agent, a detectable agent, or a combination thereof) from the peptide, e.g., after targeting to the target tissue or cell or subcellular compartment or after endocytosis. In some cases, the linker is enzyme cleavable, e.g., a valine-citrulline linker (SEQ ID NO: 217) that can be cleavable by cathepsin, or an ester linker that can be cleavable by esterase. In some embodiments, the linker contains a self-immolating portion. In other embodiments, the linker includes one or more cleavage sites for a specific protease, such as a cleavage site for matrix metalloproteases (MMPs), thrombin, urokinase-type plasminogen activator, or cathepsin (e.g., cathepsin K).

[0317] Thus, in some cases, a peptide-active agent complexes of the present disclosure can comprise one or more, about two or more, about three or more, about five or more, about ten or more, or about 15 or more amino acids that can form an amino acid sequence cleavable by an enzyme. Such enzymes can include proteinases. A peptide-active agent complex can comprise an amino acid sequence that can be cleaved by a Cathepsin, a Chymotrypsin, an Elastase, a Subtilisin, a Thrombin I, or a Urokinas, or any combination thereof.

[0318] Alternatively or in combination, the cleavable linker can be cleaved, dissociated, or broken by other mechanisms, such as via pH, reduction, or hydrolysis. Hydrolysis can occur directly due to water reaction, or be facilitated by an enzyme, or be facilitated by presence of other chemical species. A hydrolytically labile linker, (amongst other cleavable linkers described herein) can be advantageous in terms of releasing active agents from the peptide. For example, an active agent in a conjugate form with the peptide may not be active, but upon release from the conjugate after targeting to the target tissue or cell or subcellular compartment, the active agent is active. The cleaved active agent may retain the chemical structure of the active agent before cleavage or may be modified. In some embodiments, a stable linker may optionally not cleave in buffer over extended periods of time (e.g., hours, days, or weeks). In some embodiments, a stable linker may optionally not cleave in body fluids such as plasma or synovial fluid over extended periods of time (e.g., hours, days, or weeks). In some embodiments, a stable linker optionally may cleave, such as after exposure to enzymes, reactive oxygen species, other chemicals or enzymes that may be present in cells (such as macrophages), cellular compartments (such as endosomes and lysosomes), inflamed areas of the body (such as inflamed joints), or tissues or body compartments. In some embodiments, a stable linker may optionally not cleave in vivo but present an active agent that is still active when conjugated to, linked to, or fused to the peptide.

[0319] The rate of hydrolysis of the linker (e.g., a linker of a peptide conjugate) can be tuned. For example, the rate of hydrolysis of linkers with unhindered esters may be faster compared to the hydrolysis of linkers with bulky groups next an ester carbonyl. A bulky group can be a methyl group, an ethyl group, a phenyl group, a ring, or an isopropyl group, or any group that provides steric bulk. In another example, the rate of hydrolysis can be faster with hydrophilic groups, such as alcohols, acids, or ethers, or near an ester carbonyl. In another example, hydrophobic groups present as side chains or by having a longer hydrocarbon linker can slow cleavage of the ester. In some embodiments, cleavage of a carbamate group can also be tuned by hindrance, hydrophobicity, and the like. In another example, using a less labile linker, such as a carbamate rather than an ester, can slow the cleavage rate of the linker. In some cases, the steric bulk can be provided by the drug itself, such as by ketorolac when conjugated via its carboxylic acid. The rate of hydrolysis of the linker can be tuned according to the residency time of the conjugate in the target tissue or cell or subcellular compartment, according to how quickly the peptide accumulates in the target tissue or cell or subcellular compartment, or according to the desired time frame for exposure to the active agent in the target tissue or cell or subcellular compartment. For example, when a peptide is cleared from the target tissue or cell or subcellular compartment relatively quickly, the linker can be tuned to rapidly hydrolyze. In contrast, for example, when a peptide has a longer residence time in the target tissue or cell or subcellular compartment, a slower hydrolysis rate can allow for extended delivery of an active agent. This can be important when the peptide is used to deliver a drug to the target tissue or cell or subcellular compartment (e.g., a tumor cell or a tumor tissue). “Programmed hydrolysis in designing paclitaxel prodrug for nanocarrier assembly” Sci Rep 2015, 5, 12023 Fu et al., provides an example of modified hydrolysis rates. In some embodiments, rates of cleavage can vary by species, body compartment, and disease state. For instance, cleavage by esterases may be more rapid in rat or mouse plasma than in human plasma, such as due to different levels of carboxyesterases. In some embodiments, a linker may be tuned for different cleavage rates for similar cleavage rates in different species.

[0320] In some cases, a linker can be a succinic linker, and a drug can be attached to a peptide via an ester bond or an amide bond with two methylene carbons in between. In other cases, a linker can be any linker with both a hydroxyl group and a carboxylic acid, such as hydroxy hexanoic acid or lactic acid.

[0321] In some embodiments, the linker can release the active agent in an unmodified form. In other embodiments, the active agent can be released with chemical modification. In still other embodiments, catabolism can release the active agent still linked to parts of the linker and/or peptide.

[0322] The linker can be a stable linker or a cleavable linker. In some embodiments, the stable linker can slowly release the conjugated moiety by an exchange of the conjugated moiety onto the free thiols on serum albumin. In some embodiments, the use of a cleavable linker can permit release of the conjugated moiety (e.g., an active agent) from the peptide, e.g., after administration to a subject in need thereof. In other embodiments, the use of a cleavable linker can permit the release of the conjugated therapeutic from the peptide. In some cases, the linker is enzyme cleavable, e.g., a valine-citrulline linker (SEQ ID NO: 217). In some embodiments, the linker contains a self-immolating portion. In other embodiments, the linker includes one or more cleavage sites for a specific protease, such as a cleavage site for matrix metalloproteases (MMPs), thrombin, cathepsins, peptidases, or beta-glucuronidase. Alternatively or in combination, the linker is cleavable by other mechanisms, such as via pH, reduction, or hydrolysis.

[0323] The rate of hydrolysis or reduction of the linker can be fine-tuned or modified depending on an application. For example, the rate of hydrolysis of linkers with unhindered esters can be faster compared to the hydrolysis of linkers with bulky groups next to an ester carbonyl. A bulky group can be a methyl group, an ethyl group, a phenyl group, a ring, or an isopropyl group, or any group that provides steric bulk. In some cases, the steric bulk can be provided by the drug itself, such as by ketorolac when conjugated, linked, or fused via its carboxylic acid. The rate of hydrolysis of the linker can be tuned according to the residency time of the conjugate or fusion in the target location. For example, when a peptide is cleared from a tumor, or the brain, relatively quickly, the linker can be tuned to rapidly hydrolyze. When a peptide has a longer residence time in the target location, a slower hydrolysis rate would allow for extended delivery of an active agent.

[0324] The rate of hydrolysis of the linker (e.g., a linker of a peptide conjugate) can be measured. Such measurements can include determining free active agent in plasma, or synovial fluid, or other fluid or tissue of a subject in vivo and/or by incubating a linker or a peptide conjugate comprising a linker of the present disclosure with a buffer (e.g., PBS) or blood plasma from a subject (e.g., rat plasma, human plasma, etc.) or synovial fluid or other fluids or tissues ex vivo. The methods for measuring hydrolysis rates can include taking samples during incubation or after administration and determine free active agent, free peptide, or any other parameter indicate of hydrolysis, including also measuring total peptide, total active agent, or conjugated active agent-peptide. The results of such measurements can then be used to determine a hydrolysis half-life of a given linker or peptide conjugate comprising the linker. A hydrolysis half-life of a linker can differ depending on the plasma or fluid or species or other conditions used to determine such half-life. This can be due to certain enzymes or other compounds present in a certain plasma (e.g., rat plasma). For instance, different fluids (such as plasma or synovial fluid) can contain different amounts of enzymes such as esterases, and these levels of these compounds can also vary depending on species (such as rat versus human) as well as disease state (such as normal versus arthritic).

[0325] The conjugates of the present disclosure can be described as having a modular structure comprising various components, wherein each of the components (e.g., peptide, linker, active agent and/or detectable agent) can be selected dependently or independently of any other component. For example, a conjugate for use in the treatment of pain can comprise a PD-L1-binding peptide of the present disclosure (e.g., those having the amino acid sequence of any one of SEQ ID NO: 1-SEQ ID NO: 118, SEQ ID NO: 435, SEQ ID NO: 436, or SEQ ID NO: 554-SEQ ID NO: 567), a linker (e.g., any linker described in TABLE 8 or TABLE 9, SEQ ID NO: 154-SEQ ID NO: 241, SEQ ID NO: 433, or otherwise described) and an active agent (e.g., a therapeutic agent, a detectable agent, or an immune cell binding moiety). The linker, for example, can be selected and/or modified to achieve a certain active agent release (e.g., a certain release rate) via a certain mechanism (e.g., via hydrolysis, such as enzyme and/or pH-dependent hydrolysis) at the target site (e.g., in the brain) and/or to minimize systemic exposure to the active agent. During the testing of a conjugate any one or more of the components of the conjugate can be modified and/or altered to achieve certain in vivo properties of the conjugate, e.g., pharmacokinetic (e.g., clearance time, bioavailability, uptake and retention in various organs) and/or pharmacodynamic (e.g., target engagement) properties. Thus, the conjugates of the present disclosure can be modulated to prevent, treat, and/or diagnose a variety of diseases and conditions, while reducing side effects (e.g., side effects that occur if such active agents are administered alone (i.e., not conjugated to a peptide)).

[0326] In some embodiments, the non-natural amino acid can comprise one or more functional groups, e.g., alkene or alkyne, that can be used as functional handles. For example, a multiple bond of such functional groups can be used to add one or more molecules to the conjugate. The one or more molecules can be added using various synthetic strategies, some of which may include addition and/or substitution chemistries. For example, an addition reaction using a multiple bond can comprise the use of hydrobromic acid, wherein the bromine can act as a leaving group and thus be substituted with various moieties, e.g., active agents, detectable agents, agents that can modify or alter the pharmacokinetic (e.g., plasma half-life, retention and/or uptake in central nervous system (CNS) or elsewhere) and/or pharmacodynamic (e.g., hydrolysis rate such as an enzymatic hydrolysis rate) properties of the conjugate.

[0327] In some embodiments, a conjugate as described herein comprises one or more non-natural amino acid and/or one or more linkers. Such one or more non-natural amino acid and/or one or more linkers can comprise one or more functional groups, e.g., alkene or alkyne (e.g., non-terminal alkenes and alkynes), which can be used as functional handles. For example, a multiple bond of such functional groups can be used to add one or more molecules to the conjugate. The one or more molecules can be added using various synthetic strategies, some of which may include addition and/or substitution chemistries, cycloadditions, etc. For example, an addition reaction using a multiple bond can comprise the use of hydrogen bromide (e.g., via hydrohalogenation reactions), wherein the bromide substituent, once attached, can act as a leaving group and thus be substituted with various moieties comprising a nucleophilic functional groups, e.g., active agents, detectable agents, agents. As another example, a multiple bond can be used as a functional handle in a cycloaddition reaction. Cycloaddition reactions can comprise 1,3-dipolar cycloadditions, [2+2]-cycloadditions (e.g., photocatalyzed), Diels-Alder reactions, Huisgen cycloadditions, nitrone-olefin cycloadditions, etc. Such cycloaddition reactions can be used to attached various functional groups, functional moieties, active agents, detectable agents, and so forth to the conjugate. For example, a 1,3-dipolar cycloaddition reaction can be used to attach a molecule to a conjugate, wherein the molecule comprises a 1,3-dipole that can react with, e.g., an alkyne to form a 5-membered ring, thereby attaching said molecule to the conjugate.

[0328] The addition of such agents or molecules (e.g., via nucleophilic or electrophilic addition followed by nucleophilic substitution) can have various application. For example, attaching such molecule or agent can modify or alter the pharmacokinetic (e.g., plasma half-life, retention and/or uptake in CNS or biodistribution) and/or pharmacodynamic (e.g., hydrolysis rate such as an enzymatic hydrolysis rate) properties of the conjugate. Attaching such molecule or agent can also alter (e.g., increase) the depot effect of a conjugate, or provide functionality for in vivo tracking, e.g., using fluorescence or other types of detectable agents.

[0329] In some embodiments, a conjugate of the present disclosure can comprise a linker comprising one or more of the following groups:

[chemical structure]

or a substituted analog or a stereoisomer thereof, wherein each n1 and n2 is independently a value from 1 to 10. Such a group can be used as a handle to attach one or more molecules to a conjugate, e.g., to alter the pharmacokinetic (e.g., plasma half-life, retention and/or uptake in central nervous system (CNS) or elsewhere) and/or pharmacodyna via nucleophilic or electrophilic addition followed by nucleophilic substitution mic properties of the conjugate. Functionalization of such a group can occur using one or more multiple bonds (e.g., double bonds, triple bonds, etc.) of the groups. Such functionalization can comprise addition and/or substitution chemistries. For example, a functional group of a linker, such as a double bond, can be converted into a single bond (e.g., via an addition reaction such as a nucleophilic addition reaction), wherein one or both of the carbon atoms of the newly formed single bond can have a leaving group (e.g., a bromine) attached to them. Such a leaving group can then be used (e.g., via nucleophilic substitution reaction) to attach a specific molecule (e.g., an active agent, a detectable agent, etc.) to that carbon atom(s) of the linker.

[0330] As another example, a multiple bond can be used as a functional handle in a cycloaddition reaction. Cycloaddition reactions can comprise 1,3-dipolar cycloadditions, [2+2]-cycloadditions (e.g., photocatalyzed), Diels-Alder reactions, Huisgen cycloadditions, nitrone-olefin cycloadditions, etc. Such cycloaddition reactions can be used to attached various functional groups, functional moieties, active agents, detectable agents, and so forth to the conjugate. For example, a 1,3-dipoalr cycloaddition reaction can be used to attach a molecule to a conjugate, wherein the molecule comprises a 1,3-dipole that can react with, e.g., an alkyne to form a 5-membered ring, thereby attaching said molecule (e.g., active agent, detectable agent, etc.) to the conjugate. In some cases, molecules may be attached to a conjugate to e.g., modulate the half-life, increase the depot effect, or provide new functionality of a conjugate, such as fluorescence for tracking.

### Peptide Linkers

[0331] The peptides of the presented disclosure (e.g., PD-L1-binding peptides or peptide complexes) can be linked or fused in numerous ways. For example, a PD-L1-binding peptide can be linked or fused to an active agent (e.g., a therapeutic agent, an immune cell binding moiety, an Fc, or an albumin-binding peptide) via a peptide linker to form a PD-L1-binding peptide complex. In some embodiments, a peptide linker does not disturb the independent folding of peptide domains (e.g., of a PD-L1-binding peptide). In some embodiments, a peptide linker does not negatively impact manufacturability (synthetic or recombinant) of the peptide complex (e.g., the PD-L1-binding peptide complex). In some embodiments, a peptide linker does not impair post-synthesis chemical alteration (e.g. conjugation of a fluorophore or albumin-binding chemical group) of the peptide complex (e.g., the PD-L1-binding peptide complex).

[0332] In some embodiments, a peptide linker can connect the C-terminus of a first peptide (e.g., a PD-L1-binding peptide) to the N-terminus of a second peptide (e.g., an active agent peptide). In some embodiments, a peptide linker can connect the C-terminus of the second peptide (e.g., an active agent peptide) to the N-terminus of a third peptide (e.g., a PD-L1-binding peptide).

[0333] In some embodiments, a linker can comprise a Tau-theraphotoxin-Hs1a, also known as DkTx (double-knot toxin), extracted from a native knottin-knottin dimer from Haplopelma schmidti (e.g., SEQ ID NO: 166). The linker can lack structural features that would interfere with dimerizing independently functional proteins or peptides (e.g., a PD-L1-binding peptide and an immune cell targeting agent). In some embodiments, a linker can comprise a glycine-serine (Gly-Ser or GS) linker (e.g., SEQ ID NO: 154-SEQ ID NO: 165 or SEQ ID NO: 194-SEQ ID NO: 199). Gly-Ser linkers can have minimal chemical reactivity and can impart flexibility to the linker. Serines can increase the solubility of the linker or the peptide complex, as the hydroxyl on the side chain is hydrophilic. In some embodiments, a linker can be derived from a peptide that separates the Fc from the Fv domains in a heavy chain of human immunoglobulin G (e.g., SEQ ID NO: 167). In some embodiments, a linker derived from a peptide from the heavy chain of human IgG can comprise a cysteine to serine mutation relative to the native IgG peptide.

[0334] In some embodiments, peptides of the present disclosure can be dimerized using an immunoglobulin heavy chain Fc domain. These Fc domains can be used to dimerize functional domains (e.g., a PD-L1-binding peptide and an immune cell targeting agent), either based on antibodies or other otherwise soluble functional domains. In some embodiments, dimerization can be homodimeric if the Fc sequences are native. In some embodiments, dimerization can be heterodimeric by mutating the Fc domain to generate a “knob-in-hole” format where one Fc CH3 domain contains novel residues (knob) designed to fit into a cavity (hole) on the other Fc CH3 domain. A first peptide domain (e.g., a PD-L1-binding peptide) can be coupled to the knob, and a second peptide domain (e.g., an immune cell targeting agent) can be coupled to the hole. Knob+knob dimers can be highly energetically unfavorable. A purification tag can be added to the “knob” side to remove hole+hole dimers and select for knob+hole dimers.

[0335] The peptides of the present disclosure (e.g., the PD-L1-binding peptides) can be linked to another peptide (e.g., an active agent peptide) at the N-terminus or C-terminus. In some embodiments, one or more peptides can be linked or fused via a peptide linker (e.g., a peptide linker comprising a sequence of any of SEQ ID NO: 154-SEQ ID NO: 241 or SEQ ID NO: 433). For example, a PD-L1-binding peptide can be fused to an active agent via a peptide linker of any of SEQ ID NO: 154-SEQ ID NO: 241 or SEQ ID NO: 433. A peptide linker (e.g., a linker connecting a PD-L1-binding peptide and an active agent) can have a length of about 2, about 3, about 4, about 5, about 6, about 7, about 8, about 9, about 10, about 11, about 12, about 13, about 14, about 15, about 16, about 17, about 18, about 19, about 20, about 21, about 22, about 23, about 24, about 25, about 30, about 35, about 40, about 45, or about 50 amino acid residues. A peptide linker can have a length of from about 2 to about 5, from about 2 to about 10, from about 2 to about 20, from about 3 to about 5, from about 3 to about 10, from about 3 to about 15, from about 3 to about 20, from about 3 to about 25, from about 5 to about 10, from about 5 to about 15, from about 5 to about 20, from about 5 to about 25, from about 10 to about 15, from about 10 to about 20, from about 10 to about 25, from about 15 to about 20, from about 15 to about 25, from about 20 to about 25, from about 20 to about 30, from about 20 to about 35, from about 20 to about 40, from about 20 to about 45, from about 20 to about 50, from about 3 to about 50, from about 3 to about 40, from about 3 to about 30, from about 10 to about 40, from about 10 to about 30, from about 50 to about 100, from about 100 to about 200, from about 200 to about 300, from about 300 to about 400, from about 400 to about 500, or from about 500 to about 600 amino acid residues.

[0336] In some embodiments, a peptide can be appended to the N-terminus of any peptide of the present disclosure following an N-terminal GS dipeptide and preceding, for example, a GGGS (SEQ ID NO: 154) spacer. In some embodiments, a peptide (e.g., an active agent) can be appended to either the N-terminus or C-terminus of any peptide disclosed herein (e.g., a PD-L1-binding peptide) using a peptide linker such as GₓS_{y} (SEQ ID NO: 155) peptide linker, wherein x and y independently are any whole number, such as 1, 2, 3, 4, 5, 6, 7, 8, 9, 10, 12, 16, or 20 and the G and S residues are arranged in any order. In some embodiments, the peptide linker comprises (GS)x (SEQ ID NO: 156), wherein x can be any whole number, such as 1, 2, 3, 4, 5, 6, 7, 8, 9, and 10. In some embodiments, the peptide linker comprises GGSSG (SEQ ID NO: 157), GGGGG (SEQ ID NO: 158), GSGSGSGS (SEQ ID NO: 159), GSGG (SEQ ID NO: 160), GGGGS (SEQ ID NO: 161), GGGS (SEQ ID NO: 154), GGS (SEQ ID NO: 162), GGGSGGGSGGGS (SEQ ID NO: 163), or a variant or fragment thereof or any number of repeats and combinations thereof. Additionally, KKYKPYVPVTTN (SEQ ID NO: 166) from DkTx, and EPKSSDKTHT (SEQ ID NO: 167) from human IgG₃ can be used as a peptide linker or any number of repeats and combinations thereof. In some embodiments, the peptide linker comprises GGGSGGSGGGS (SEQ ID NO: 164) or a variant or fragment thereof or any number of repeats and combinations thereof.

[0337] In some embodiments, a linker of the present disclosure can comprise a cleavable or stable linker moiety. In some embodiments, cleavable linkers of the present disclosure can include, for example, protease cleavable peptide linkers, nuclease sensitive nucleic acid linkers, lipase sensitive lipid linkers, glycosidase sensitive carbohydrate linkers, pH sensitive linkers, hypoxia sensitive linkers, photo-cleavable linkers, heat-labile linkers, enzyme cleavable linkers (e.g., esterase cleavable linker), ultrasound-sensitive linkers, and X-ray cleavable linkers. In some embodiments, the linker is not a cleavable linker.

[0338] A linker can comprise multiple amino acids. A linker can comprise 1, 2, 3, 4, 5, 6, 7, 8, 9, 10, 20 or more amino acids. A linker can comprise any of the linkers in the below TABLE 9 (where X=6-azidohexanoic acid and Z=citrulline). In some cases, an active can be attached to a peptide using any one or more of the linkers shown below in TABLE 9. In some embodiments, the peptide linker comprises a linker of any of SEQ ID NO: 154-SEQ ID NO: 241 or SEQ ID NO: 433. Examples of peptide linkers compatible with the peptide complexes of the present disclosure are provided in TABLE 9. It is understood that any of the foregoing linkers or a variant or fragment thereof can be used with any number of repeats or any combinations thereof. It is also understood that other peptide linkers in the art or a variant or fragment thereof can be used with any number of repeats or any combinations thereof.

TABLE 9
Exemplary Peptide Linkers

| SEQ ID NO | Sequence |
|---|---|
| SEQ ID NO: 154 | GGGS |
| SEQ ID NO: 155 | GₓS_{y} |
| SEQ ID NO: 156 | (GS)x |
| SEQ ID NO: 157 | GGSSG |
| SEQ ID NO: 158 | GGGGG |
| SEQ ID NO: 159 | GSGSGSGS |
| SEQ ID NO: 160 | GSGG |
| SEQ ID NO: 161 | GGGGS |
| SEQ ID NO: 162 | GGS |
| SEQ ID NO: 163 | GGGSGGGSGGGS |
| SEQ ID NO: 164 | GGGSGGSGGGS |
| SEQ ID NO: 165 | GGGGSGGGGSGGGGS |
| SEQ ID NO: 166 | KKYKPYVPVTTN |
| SEQ ID NO: 167 | EPKSSDKTHT |
| SEQ ID NO: 168 | AGSGGSGGSGGSPVPSTPPTNSSSTPPTPSPSPVPSTPPTNSSSTPPTP |
| | SPSPVPSTPPTNSSSTPPTPSPSAS |
| SEQ ID NO: 169 | AGSGGSGGSGGSPVPSTPPTPSPSTPPTPSPSPVPSTPPTNSSSTPPTP |
| | SPSPVPSTPPTPSPSTPPTPSPSAS |
| SEQ ID NO: 170 | AGSGGSGGSGGSPVPSTPPTPSPSTPPTPSPSGGSGNSSGSGGSPVPS |
| | TPPTPSPSTPPTPSPSAS |
| SEQ ID NO: 171 | AGSGGSGGSGGSPVPSTPPTPSPSTPPTPSPSPVPSTPPTPSPSTPPTP |
| | SPSPVPSTPPTPSPSTPPTPSPSAS |
| SEQ ID NO: 172 | AGSGGSGGSGGSPVPSTPPTPSPSTPPTPSPSIQRTPKIQVYSRHPAE |
| | NGKSNFLNCYVSGFHPSDIEVDLLKNGERIEKVEHSDLSFSKDWSF |
| | YLLYYTEFTPTEKDEYACRVNHVTLSQPKIVKWDRDPVPSTPPTPS |
| | PSTPPTPSPSAS |
| SEQ ID NO: 173 | AGSGGSGGSGGSPVPSTPPTPSPSTPPTPSPSIQRTPKIQVYSRHPAE |
| | NGKSNFLNCYVSGFHPSDIEVDLLKNGERIEKVEHSDLSFSKDWSF |
| | YLLYYTEFTPTEKDEYACRVNHVTLSQPKIVKWDRDGGSGGSGG |
| | SGGSAS |
| SEQ ID NO: 174 | AGPVPSTPPTPSPSTPPTPSPSIQRTPKIQVYSRHPAENGKSNFLNCY |
| | VSGFHPSDIEVDLLKNGERIEKVEHSDLSFSKDWSFYLLYYTEFTP |
| | TEKDEYACRVNHVTLSQPKIVKWDRDGGSGGSGGSGGSIQRTPKI |
| | QVYSRHPAENGKSNFLNCYVSGFHPSDIEVDLLKNGERIEKVEHS |
| | DLSFSKDWSFYLLYYTEFTPTEKDEYACRVNHVTLSQPKIVKWDR |
| | DGGSGGSGGSGAS |
| SEQ ID NO: 175 | AGSGGSGGSGGSPVPSTPPTPSPSTPPTPSPSIQRTPKIQVYSRHPAE |
| | NGKSNFLNCYVSGFHPSDIEVDLLKNGERIEKVEHSDLSFSKDWSF |
| | YLLYYTEFTPTEKDEYACRVNHVTLSQPKIVKWDRDGGSGGSGG |
| | SGGSIQRTPKIQVYSRHPAENGKSNFLNCYVSGFHPSDIEVDLLKN |
| | GERIEKVEHSDLSFSKDWSFYLLYYTEFTPTEKDEYACRVNHVTLS |
| | QPKIVKWDRDPVPSTPPTPSPSTPPTPSPSAS |
| SEQ ID NO: 176 | AGSGGSGGSGGSPVPSTPPTPSPSTPPTPSPSQIFVKTLTGKTITLEV |
| | EPSDTIENVKAKIQDKEGIPPDQQRLIFAGKQLEDGRTLSDYNIQKE |
| | STLHLVLRLRGGGGSGGSGGSGGSAS |
| SEQ ID NO: 177 | AGSGGSGGSGGSPVPSTPPTPSPSTPPTPSPSDGRYSLTYIYTGLSK |
| | HVEDVPAFQALGSLNDLQFFRYNSKDRKSQPMGLWRQVEGMED |
| | WKQDSQLQKAREDIFMETLKDIVEYYNDSNGSHVLQGRFGCEIEN |
| | NRSSGAFWKYYYDGKDYIEFNKEIPAWVPFDPAAQITKQKWEAE |
| | PVYVQRAKAYLEEECPATLRKYLKYSKNILDRQDPPSVVVTSHQA |
| | PGEKKKLKCLAYDFYPGKIDVHWTRAGEVQEPELRGDVLHNGNG |
| | TYQSWVVVAVPPQDTAPYSCHVQHSSLAQPLVVPWEASPVPSTPP |
| | TPSPSTPPTPSAS |
| SEQ ID NO: 178 | AGSGGSGGSGGSGGSGGSGGSGGSDGRYSLTYIYTGLSKHVEDVP |
| | AFQALGSLNDLQFFRYNSKDRKSQPMGLWRQVEGMEDWKQDSQ |
| | LQKAREDIFMETLKDIVEYYNDSNGSHVLQGRFGCEIENNRSSGAF |
| | WKYYYDGKDYIEFNKEIPAWVPFDPAAQITKQKWEAEPVYVQRA |
| | KAYLEEECPATLRKYLKYSKNILDRQDPPSVVVTSHQAPGEKKKL |
| | KCLAYDFYPGKIDVHWTRAGEVQEPELRGDVLHNGNGTYQSWV |
| | VVAVPPQDTAPYSCHVQHSSLAQPLVVPWEASGGSGGSGGSGGS |
| | DGRYSLTYIYTGLSKHVEDVPAFQALGSLNDLQFFRYNSKDRKSQ |
| | PMGLWRQVEGMEDWKQDSQLQKAREDIFMETLKDIVEYYNDSN |
| | GSHVLQGRFGCEIENNRSSGAFWKYYYDGKDYIEFNKEIPAWVPF |
| | DPAAQITKQKWEAEPVYVQRAKAYLEEECPATLRKYLKYSKNIL |
| | DRQDPPSVVVTSHQAPGEKKKLKCLAYDFYPGKIDVHWTRAGEV |
| | QEPELRGDVLHNGNGTYQSWVVVAVPPQDTAPYSCHVQHSSLAQ |
| | PLVVPWEASPVPSTPPTPSPSTPPTPSPSAS |
| SEQ ID NO: 179 | AGSGNSSGSGGSGGSGNSSGSGGSPVPSTPPTPSPSTPPTPSPSAS |
| SEQ ID NO: 180 | KLSGGGGSGGGGSGGGGSAEAWYNLGNAYYKQGDYQKAIEYYQ |
| | KALELDPNNAEAWYNLGNAYYKQGDYQKAIEYYQKALELDPNN |
| | AEAWYNLGNAYYKQGDYQKAIEDYQKALELDPNNLQRSAGGGG |
| | SGGGGSGGGGAS |
| SEQ ID NO: 181 | KLSGGGGSGGGGSGGGGSAEAWYNLGNAYYKQGDYQKAIEYYQ |
| | KALELDPNNAEAWYNLGNAYYKQGDYQKAIEYYQKALELDPNN |
| | AEAWYNLGNAYYKQGDYQKAIEDYQKALELDPNNLQAEAWKN |
| | LGNAYYKQGDYQKAIEYYQKALELDPNNASAWYNLGNAYYKQ |
| | GDYQKAIEYYQKALELDPNNAKAWYRRGNAYYKQGDYQKAIED |
| | YQKALELDPNNRSRSAGGGGSGGGGSGGGGAS |
| SEQ ID NO: 182 | KLSGGGGSGGGGSGGGGSAEAWYNLGNAYYKQGDYQKAIEYYQ |
| | KALELDPNNAEAWYNLGNAYYKQGDYQKAIEYYQKALELDPNN |
| | AEAWYNLGNAYYKQGDYQKAIEDYQKALELDPNNLQAEAWKN |
| | LGNAYYKQGDYQKAIEYYQKALELDPNNASAWYNLGNAYYKQ |
| | GDYQKAIEYYQKALELDPNNAKAWYRRGNAYYKQGDYQKAIED |
| | YQKALELDPNNRSAEAWYNLGNAYYKQGDYQKAIEYYQKALEL |
| | DPNNAEAWYNLGNAYYKQGDYQKAIEYYQKALELDPNNAEAW |
| | YNLGNAYYKQGDYQKAIEDYQKALELDPNNLQRSAGGGGSGGG |
| | GSGGGGAS |
| SEQ ID NO: 183 | KLSGGGGSGGGGSGGGGSAEAWYNLGNAYYKQGDYQKAIEYYQ |
| | KALELDPNNAEAWYNLGNAYYKQGDYQKAIEYYQKALELDPNN |
| | AEAWYNLGNAYYKQGDYQKAIEDYQKALELDPNNLQAEAWKN |
| | LGNAYYKQGDYQKAIEYYQKALELDPNNASAWYNLGNAYYKQ |
| | GDYQKAIEYYQKALELDPNNAKAWYRRGNAYYKQGDYQKAIED |
| | YQKALELDPNNRSAEAWYNLGNAYYKQGDYQKAIEYYQKALEL |
| | DPNNAEAWYNLGNAYYKQGDYQKAIEYYQKALELDPNNAEAW |
| | YNLGNAYYKQGDYQKAIEDYQKALELDPNNLQAEAWKNLGNAY |
| | YKQGDYQKAIEYYQKALELDPNNASAWYNLGNAYYKQGDYQK |
| | AIEYYQKALELDPNNAKAWYRRGNAYYKQGDYQKAIEDYQKAL |
| | ELDPNNRSAGGGGSGGGGSGGGGAS |
| SEQ ID NO: 184 | GGGGSAS |
| SEQ ID NO: 185 | GGGGSGGGGSAS |
| SEQ ID NO: 186 | GGGGSGGGGSGGGGSAS |
| SEQ ID NO: 187 | GGGGSGGGGSGGGGSGGGGSGGGGSAS |
| SEQ ID NO: 188 | GGGGSGGGGSGGGGSGGGGSGGGGSGGGGSAS |
| SEQ ID NO: 189 | AGGGSGGGGSGGGGSGGGGSGGGGSGGGGSGGGGSAS |
| SEQ ID NO: 190 | AGGGSGGGGSGGGGSGGGGSGGGGSGGGGSGGGGSGGGGSAS |
| SEQ ID NO: 191 | AGGGSGGGGSGGGGSGGGGSGGGGSGGGGSGGGGSGGGGSGGG |
| | GSAS |
| SEQ ID NO: 192 | G |
| SEQ ID NO: 193 | A |
| SEQ ID NO: 194 | GS |
| SEQ ID NO: 195 | GA |
| SEQ ID NO: 196 | GSS |
| SEQ ID NO: 197 | GSSS |
| SEQ ID NO: 198 | GSSSS |
| SEQ ID NO: 199 | (GSSS)_{y} where y = 1-10 |
| SEQ ID NO: 200 | VA |
| SEQ ID NO: 201 | VZ |
| SEQ ID NO: 202 | GVZG |
| SEQ ID NO: 203 | FK |
| SEQ ID NO: 204 | VK |
| SEQ ID NO: 205 | GVAG |
| SEQ ID NO: 206 | GVZGG |
| SEQ ID NO: 207 | XG |
| SEQ ID NO: 208 | XGG |
| SEQ ID NO: 209 | XA |
| SEQ ID NO: 210 | XAA |
| SEQ ID NO: 211 | XGS |
| SEQ ID NO: 212 | XGA |
| SEQ ID NO: 213 | XGVZG |
| SEQ ID NO: 214 | XGVAG |
| SEQ ID NO: 215 | XGVZGG |
| SEQ ID NO: 216 | Val-Arg |
| SEQ ID NO: 217 | Val-Cit |
| SEQ ID NO: 218 | Phe-Lys |
| SEQ ID NO: 219 | Met-Lys |
| SEQ ID NO: 220 | Asn-Lys |
| SEQ ID NO: 221 | Ile-Pro |
| SEQ ID NO: 222 | Gly-Ile |
| SEQ ID NO: 223 | Gly-Leu |
| SEQ ID NO: 224 | Gly-Tyr |
| SEQ ID NO: 225 | Gly-Met |
| SEQ ID NO: 226 | Met-Ile |
| SEQ ID NO: 227 | Ala-Ile |
| SEQ ID NO: 228 | Pro-Ile |
| SEQ ID NO: 229 | Gly-Pro-Gln-Gly-Ile-Ala-Gly-Gln |
| SEQ ID NO: 230 | Gly-Pro-Gln-Gly-Ile-Phe-Gly-Gln |
| SEQ ID NO: 231 | Gly-Pro-Gln-Gly-Ile-Trp-Gly-Gln |
| SEQ ID NO: 232 | Gly-Pro-Gln-Gly-Ile-Leu-Gly-Gln |
| SEQ ID NO: 233 | Gly-Pro-Gln-Gly-Ile-Arg-Gly-Gln |
| SEQ ID NO: 234 | Gly-Pro-Leu-Gly-Ile-Ala-Gly-Gln |
| SEQ ID NO: 235 | Gly-Pro-Met-Gly-Ile-Ala-Gly-Gln |
| SEQ ID NO: 236 | Gly-Pro-Tyr-Gly-Ile-Ala-Gly-Gln |
| SEQ ID NO: 237 | GSVAGS |
| SEQ ID NO: 238 | GGGGSVAGGGGS |
| SEQ ID NO: 239 | GGGGSGGGGSVAGGGGSGGGGS |
| SEQ ID NO: 240 | GGGGSGGGGSPLGLAGGGGGSGGGGS |
| SEQ ID NO: 241 | AEAAAKEAAAKAVAAEAAAKEAAAKA |
| SEQ ID NO: 433 | GGGSGGGS |

[0339] A linker can provide a minimum distance between the PD-L1-binding peptide and the active agent, such that the active agent does not inhibit or prevent binding of the PD-L1-binding peptide to PD-L1. Similarly, linker can provide a minimum distance between the PD-L1-binding peptide and the active agent (e.g., an additional binding moiety), such that the PD-L1-binding peptide does not inhibit or prevent binding of the active agent to its target (e.g., an immune cell target). A linker can be long enough to avoid steric hindrance of the active agent inhibiting binding of the peptide to PD-L1. A linker can be longer than the shortest distance of the N-terminal amine in the peptide to PD-L1 when bound. A linker can be longer than a salt bridge, which can be 2-4 angstroms long. A linker can be at least 5, 10, 20, 40 or more angstroms long. A linker can comprise at least 1, at least 2, at least 3, at least 5, at least 10, at least 15, at least 20, and least 25, or more carbon, oxygen, nitrogen, sulfur, and/or phosphorous atoms in the linker backbone between the peptide and the oligonucleotide. A linker can include 1, 2, 3, 4, 5, 10, 15, 20 or more amino acids. A linker can include 1, 2, 3, 4, 5, 10, 20 or more nucleotide bases.

[0340] A peptide or peptide complex according to the present disclosure may be attached to another moiety such as a small molecule, a second peptide, a second CDP, a protein, a miniprotein, a cytokine, a cytokine-receptor chain complex, an antibody, an antibody fragment, an Fc, an Fc knob, an Fc hole, an aptamer, polypeptide, polynucleotide, a fluorophore, a radioisotope, a radionuclide chelator, a polymer, a biopolymer, a fatty acid, an acyl adduct, a binding moiety, a chemical linker, or sugar, immune-oncology agent, or other active agent described herein through a linker, or directly in the absence of a linker.

[0341] A peptide or peptide complex can be conjugated a nucleotide, an active agent, or a detectable agent via a linker that can be described with the formula Peptide-A-B-C-active agent, wherein the linker is A-B-C. A can be a stable amide link to an amine or carboxylic acid on the peptide and the linker and can be achieved via a tetrafluorophenyl (TFP) ester, an NHS ester, or an ATT group (thiazolidine-thione). A can be a stable carbamate linker such as that formed by reacting an amine on the peptide with an imidazole carbamate active intermediate formed by reaction of CDI with a hydroxyl on the linker. A can be a stable secondary amine linkage such as that formed by reductive alkylation of the amine on the peptide with an aldehyde or ketone group on the linker. A can be a stable thioether linker formed using a maleimide or bromoacetamide in the linker with a thiol in the peptide, a triazole linker, a stable oxime linker, or an oxacarboline linker. A can comprise a triazole. B can comprise (—CH2-)ₓ-, with or without branching a short PEG (—CH₂CH₂O—)ₓ (x is 1-20), or a short polypeptide such as GGGSGGGS (SEQ ID NO: 433), Val-Ala (SEQ ID NO: 200), Val-Cit (SEQ ID NO: 217), Val-Cit-PABC, Gly-Ile (SEQ ID NO: 222), Gly-Leu (SEQ ID NO: 223), other spacers, or no spacer. C can be a disulfide bond, an amide bond, a triazole bond, carbamate, a carbon-carbon single double or triple bond, or an ester bond to a thiol, an amine, a hydroxyl, or carboxylic acid on the active agent. C can be a thioether formed between a maleimide on the linker and a sulfhydroyl on the active agent, a secondary or tertiary amine, a carbamate, or other stable bond. In some embodiments, C can refer to the “cleavable” or “stable” part of the linker. In other embodiments, A and/or B can also be the “cleavable” or stable part. In some embodiments, A can be amide, carbamate, thioether via maleimide or bromoacetamide, triazole, oxime, or oxacarboline. Any linker chemistry described in “Current ADC Linker Chemistry,” Jain et al., Pharm Res, 2015 DOI 10.1007/s11095-015-1657-7 or in Bioconjugate Techniques, 3^{rd} edition, by Greg Hermanson can be used.

### Methods of Delivery and Treatment Using Peptides and Peptide Complexes

[0342] In some embodiments, the PD-L1-binding peptides of the present disclosure can induce a biologically relevant response. In some embodiments, the biologically relevant response can be induced after intravenous, subcutaneous, peritoneal, intracranial, intrathecal, intratumoral, or intramuscular dose, and in some embodiments, after a single intravenous, subcutaneous, peritoneal, intracranial, or intramuscular dose. In some embodiments, the PD-L1-binding peptides or PD-L1-binding peptide complexes can be used alone or in combination with various other classes of therapeutic compounds used to treat various diseases or conditions including cancers or immunological disorders (e.g., autoimmune diseases).

[0343] The term “effective amount,” as used herein, refers to a sufficient amount of an agent or a compound being administered which will relieve to some extent one or more of the symptoms of the disease or condition being treated. The result can be reduction and/or alleviation of the signs, symptoms, or causes of a disease, or any other desired alteration of a biological system. Compositions containing such agents or compounds can be administered for prophylactic, enhancing, and/or therapeutic treatments. An appropriate “effective” amount in any individual case can be determined using techniques, such as a dose escalation study.

[0344] The methods, compositions, and kits of this disclosure can comprise a method to prevent, treat, arrest, reverse, or ameliorate the symptoms of a condition. The treatment can comprise treating a subject (e.g., an individual, a domestic animal, a wild animal, or a lab animal afflicted with a disease or condition) with a peptide or peptide complex of the disclosure. The disease can be a cancer or tumor. The disease can be an autoimmune disorder. In treating the disease, the peptide can contact the tumor or cancerous cells or an immune cell. The subject can be a human. Subjects can be humans; non-human primates such as chimpanzees, and other apes and monkey species; farm animals such as cattle, horses, sheep, goats, swine; domestic animals such as rabbits, dogs, and cats; laboratory animals including rodents, such as rats, mice and guinea pigs, and the like. A subject can be of any age. Subjects can be, for example, elderly adults, adults, adolescents, pre-adolescents, children, toddlers, infants, and fetuses in utero.

[0345] Treatment can be provided to the subject before clinical onset of disease. Treatment can be provided to the subject after clinical onset of disease. Treatment can be provided to the subject after 1 day, 1 week, 6 months, 12 months, or 2 years or more after clinical onset of the disease. Treatment can be provided to the subject for more than 1 day, 1 week, 1 month, 6 months, 12 months, 2 years or more after clinical onset of disease. Treatment can be provided to the subject for less than 1 day, 1 week, 1 month, 6 months, 12 months, or 2 years after clinical onset of the disease. Treatment can also include treating a human in a clinical trial. A treatment can comprise administering to a subject a pharmaceutical composition, such as one or more of the pharmaceutical compositions described throughout the disclosure. A treatment can comprise a once daily dosing, twice a day dosing, dosing every other day, dosing every third day, dosing every week, dosing every other week, dosing every month, dosing every three months, or dosing every six months. A treatment can comprise delivering a peptide of the disclosure to a subject, either intravenously, subcutaneously, intramuscularly, by inhalation, dermally, topically, by intra-articular injection, orally, sublingually, intrathecally, transdermally, intranasally, via a peritoneal route, intratumorally (e.g., directly into a tumor such as via injection), directly into the brain (e.g., via and intracerebral ventricle route), or directly onto a joint, e.g. via topical, intra-articular injection route. A treatment can comprise administering a peptide-active agent complex to a subject, either intravenously, subcutaneously, intramuscularly, by inhalation, by intra-articular injection, dermally, topically, orally, intrathecally, transdermally, intransally, parenterally, orally, via a peritoneal route, nasally, sublingually, or directly onto cancerous tissues. Intravenous dosing can be bolus or can be by infusion.

### PD-L1 and PD-1 Inhibition

[0346] A PD-L1-binding peptide of the present disclosure (e.g., any one of SEQ ID NO: 1-SEQ ID NO: 118, SEQ ID NO: 435, SEQ ID NO: 436, or SEQ ID NO: 554-SEQ ID NO: 567) or a PD-L1-binding peptide complex may be administered to a subject (e.g., a human or non-human animal subject) to inhibit PD-L1 activity in the subject. PD-L1 activity may be associated with immunosuppression, T cell exhaustion, or immune function, and inhibiting PD-L1 may reduce immunosuppression, reduce T cell exhaustion, restore immune function, or a combination thereof. Inhibition of PD-L1 may be beneficial in diseases such as cancer in which PD-L1 positive cancer cells may evade a host immune response by inhibiting interactions between PD-L1 on the cancer cell and PD-1 on a host T cell. In some embodiments, inhibiting PD-L1 (e.g., by administering a PD-L1-binding peptide) may enhance a host immune response against the cancer cell, thereby treating the cancer. In some embodiments, inhibiting PD-L1 (e.g., by administering a PD-L1-binding peptide) may enhance a host immune response in the case of chronic infection, where T cell exhaustion may be a problem, or in sepsis or other acute infections.

[0347] The PD-L1-binding peptides of the present disclosure may inhibit PD-L1 by blocking interactions between PD-L1 and PD-1. For example, SEQ ID NO: 1 binds PD-L1 at the PD-1 binding interface, preventing PD-1 from accessing the binding interface. In some embodiments, the PD-L1 binding peptides of the present disclosure may inhibit PD-L1 by binding to and stabilizing PD-L1 in an inactive conformation.

[0348] Administration of a PD-L1-binding peptide or peptide complex may be used in a method of treating cancer by binding to and inhibiting PD-L1 upon administration to a subject. Inhibition of PD-L1 may reduce T cell exhaustion and enhance a host immune response against the cancer. The PD-L1-binding peptides described herein may be used to treat any PD-L1 positive cancer. Examples of cancers that may be treated by administering a PD-L1-binding peptide or peptide complex include melanoma, non-small cell lung cancer, small cell lung cancer, renal cancer, esophageal cancer, oral cancer, hepatocellular cancer, ovarian cancer, cervical cancer, colorectal cancer, lymphoma, bladder cancer, liver cancer, gastric cancer, breast cancer, pancreatic cancer, prostate cancer, Merkel cell carcinoma, mesothelioma, or brain cancer (e.g., glioblastoma, astrocytoma, meningioma, metastatic brain cancer, or primary brain cancer).

### Active Agent Delivery

[0349] A PD-L1-binding peptide complex of the present disclosure (e.g., a complex comprising a peptide of any one of SEQ ID NO: 1-SEQ ID NO: 118, SEQ ID NO: 435, SEQ ID NO: 436, or SEQ ID NO: 554-SEQ ID NO: 567 complexed with an active agent) may be used in a method of delivering an active agent to a cell, region, or tissue of interest in a subject. Upon administration, the PD-L1-binding peptide complex may target and bind to PD-L1 (e.g., on a PD-L1 positive cell) and deliver the active agent to the cell, tissue, or region containing the PD-L1. Targeted delivery of active agents to PD-L1 positive cells, tissues, or regions may increase the therapeutic window of the active agent compared to administration of the active agent alone because targeted delivery may result in an increased concentration of active agent at the target cell, tissue, or region compared to surrounding tissue. This may reduce negative off target effects, decrease the dosage needed to produce a therapeutic effect, or both.

[0350] A PD-L1-binding peptide complex may be administered to delivery an active agent to any PD-L1 positive cell, region, or tissue. For example, a PD-L1-binding peptide complex may deliver an active agent to a cancer cell, an immune cell, or a pancreatic beta cell. Examples of active agents that may be delivered to a PD-L1 positive cell may include immune cell targeting agents, immune cells (e.g., a T cell, a B cell, a macrophage, a natural killer cell, a fibroblast, a regulatory T cell, a regulatory immune cell, a neural stem cell, or a mesenchymal stem cell), anti-cancer agents, chemotherapeutic agents, radiotherapy agents, proinflammatory cytokines, or oligonucleotides.

[0351] Chemotherapeutic or anti-cancer agents may function by killing or inhibiting proliferation of a target cancer cell (e.g., a PD-L1 positive cancer cell). Examples of chemotherapeutics or anti-cancer agents that may be complexed with a PD-L1-binding peptide of the present disclosure include antineoplastic agents, cytotoxic agents, tyrosine kinase inhibitors, mTOR inhibitors, retinoids, or anti-cancer antibodies. Proinflammatory cytokines may function by stimulating an immune response against a target (e.g., a PD-L1 positive cancer cell). Examples of proinflammatory cytokines that may be complexed with a PD-L1-binding peptide of the present disclosure include TNFα, IL-2, TL-6, IL-12, TL-15, IL-21, or IFNγ. Anti-inflammatory agents may function by inhibiting an inflammatory response in or around the target (e.g., by inhibiting a cyclooxygenase enzyme or stimulating a glucocorticoid receptor). Examples of anti-inflammatory agents that may be complexed with a PD-L1-binding peptide of the present disclosure include anti-inflammatory cytokines, steroids, glucocorticoids, corticosteroids, or nonsteroidal anti-inflammatory drugs (NSAIDs).

[0352] Oligonucleotides may function by modulating alternative splicing of the target sequence, dictating the location of a polyadenylation site of the target sequence, inhibiting translation of the target sequence, inhibiting binding of the target sequence to a secondary target sequence, recruiting RISC to the target sequence, recruiting RNaseH1 to the target sequence, inducing cleavage of the target sequence, or regulating the target sequence upon binding of the oligonucleotide to the target sequence. In some embodiments, the oligonucleotide may comprise an oncolytic viral vector, an mRNA, an miRNA, or an siRNA.

[0353] In some embodiments, a PD-L1-binding peptide complex may be used to deliver an active agent to treat a disease or condition associated with PD-L1. For example, a PD-L1-binding peptide complex may be administered to treat a cancer (e.g., melanoma, skin cancer, non-small cell lung cancer, small cell lung cancer, non-small-cell lung carcinoma, renal cancer, esophageal cancer, oral cancer, hepatocellular cancer, ovarian cancer, cervical cancer, colorectal cancer, colon cancer, rectal cancer, head and neck cancer, lymphoma, bladder cancer, liver cancer, gastric cancer, stomach cancer, breast cancer, pancreatic cancer, prostate cancer, Merkel cell carcinoma, mesothelioma, or brain cancer, including primary brain cancer or metastatic brain cancer, a PDL1-expressing cancer, a primary cancer, a metastatic cancer, gastric cancer, squamous cell carcinoma, urothelial carcinoma, or cervical cancer), an autoimmune disease (e.g., rheumatoid arthritis, atherosclerosis, ischemia-reperfusion injury, colitis, psoriasis, lupus, inflammatory bowel disease, Crohn's disease, ulcerative colitis, multiple sclerosis, type 1 diabetes, or neuroinflammation), hyperglycemia, type 2 diabetes, infection, or neuronal injury. In some embodiments, treatment of cancer may comprise delivering an anti-cancer agent or immune stimulating agent to a PD-L1 positive cancer cell. In some embodiments, treatment of an autoimmune disorder may comprise delivery of an anti-inflammatory agent or immunosuppressive agent to a PD-L1 positive immune cell, thereby reducing an autoimmune response in the subject. In some embodiments, treatment of hyperglycemia may comprise delivering a protective agent to a pancreatic beta cell, thereby preventing onset of type 1 diabetes.

### Nucleotide and Oligo Delivery

[0354] A peptide (e.g., a PD-L1-binding peptide) may be linked, conjugated, complexed with, or fused to a nucleotide via various chemistries resulting in peptide oligonucleotide complexes that may form either a cleavable or stable linkage to deliver the oligonucleotide to a cell. For example, in some embodiments, a PD-L1-binding peptide may bind to PD-L1 on the surface of cells, which may then be taken up via endocytosis into the early endosome. The nucleotide and peptide in the PD-L1-binding peptide oligonucleotide complex may either remain together (stable) or be cleaved apart (cleavable). If the linkage is stable, the PD-L1-binding peptide oligonucleotide complex may recycle back to the cell surface. Some of the PD-L1-binding peptide oligonucleotide complex may access low pH early endosomes. Once the nucleotides within the peptide oligonucleotide complex are exposed to endosome, they may remain and not be degraded due to stabilization chemistry such as by the oligonucleotide (backbone, sugar, linkage, etc.) variations described herein. If the PD-L1-binding peptide includes additional cell penetration capabilities, the peptide may facilitate accelerated escape of the oligonucleotide from the endosomal compartment into the cytosol. Even without added cell penetration capabilities, the oligonucleotides may slowly leak out of endosomes and access the cytosol.

[0355] Cleavage away from the PD-L1 binder peptide within the peptide oligonucleotide complex may be advantageous in order to avoid repeated cycling to the cell surface or to facilitate endosomal escape of the oligonucleotide, in which case cleavable linkers may be used between the oligonucleotide and the peptide. The nucleotides within or cleaved from the peptide oligonucleotide complex may traffic, either actively or by passive diffusion, between the cytosol and nucleus. Some of the nucleotides within the peptide oligonucleotide complex can function within the nucleus of a cell, including gapmers, ASO splice blockers, and U1 adapters. Others function within the cytosol, including siRNA and anti-miRs. Aptamers are unique in that they do not function through hybridization or base paring interactions with nucleic acid targets. Instead, aptamers form secondary structures to bind to proteins or other macromolecules. Aptamers may function wherever the target protein or macromolecule is located. For example, if the target is on the surface of cells, cell penetration via endosomal accumulation may not be necessary, and it may be advantageous for linkers to be cleavable or non-cleavable depending on PD-L1-binding peptide trafficking and stability.

[0356] The nucleotide portion of the peptide oligonucleotide complexes described herein may target specific RNAs (e.g., mRNAs or pre-mRNAs) from genes expressed in cancer and other diseases. For example, the nucleotide sequence in the complex may be complementary to any target provided in SEQ ID NO: 397-SEQ ID NO: 430 or SEQ ID NO: 549, TABLE 10, or TABLE 17. The nucleotide sequence in the complex may be complementary to the target RNA, or in the case of an aptamer, may bind a target protein or other macromolecule. The a nucleotide sequence may be single stranded (ssDNA, ssRNA) or double stranded (dsDNA, dsRNA) or a combination of single and double stranded (for example with a mismatched sequence, hairpin or other structure), an antisense RNA, complementary RNA, inhibitory RNA, interfering RNA, nuclear RNA, antisense oligonucleotide (ASO), microRNA (miRNA), an oligonucleotide complementary to a natural antisense transcripts (NATs) sequences, siRNA, snRNA, aptamer, gapmer, anti-miR, splice blocker ASO, or U1 Adapter.

[0357] In some embodiments, a target of the nucleotide in a peptide oligonucleotide complex may be a gastrointestinal target, such as a gene with pro-inflammatory, extracellular matrix-modifying, or immune cell recruitment functionality. Peptide oligonucleotide complexes described herein (e.g., a peptide oligonucleotide complex comprising a PD-L1-binding peptide and a nucleotide that binds a gene target mRNA) that target gastrointestinal gene targets may be used to treat various gastrointestinal disorders, including inflammatory bowel disease (IBD), ulcerative colitis, and Crohn's disease.

[0358] In some embodiments, a target of the nucleotide in a peptide oligonucleotide complex may be a cancer target, such as a gene involved in oncogenic signaling, anti-apoptotic genes, pro-inflammatory signaling genes, protein homeostasis genes, developmental regulatory genes, or adapter protein genes that initiate downstream cell growth signaling. For example, targeting an over-expressed growth factor like HER2 can be challenging, but HER2 and other RTK (e.g., EGFR, ERBB3) signaling depends on adapter proteins like Grb2 to initiate cell growth signaling downstream. Knockdown of Grb2 can halt signaling in a way that is difficult to mutationally compensate as Grb2 loss is epistatic to HER2 activity. Cancer cells are typically under low levels of proteotoxic stress, as they are growing so quickly that their protein folding machinery struggles to keep up, so targeting protein homeostasis genes, such as heat shock proteins (HSPs), hypoxia-sensing proteins (e.g., HIF), and upregulators of the heat shock response, may reduce proteotoxic stress by helping to fold or stabilize proteins during folding. In some embodiments, a pro-inflammatory cytokine may be delivered via an mRNA in a peptide oligonucleotide complex, or an antisense construct targeting an anti-inflammatory signal may be delivered. Delivery of a pro-inflammatory signal or reduction of an anti-inflammatory signal may help to recruit B cells, T cells, macrophages, or other immune infiltrates to a tumor microenvironment. Peptide oligonucleotide complexes described herein (e.g., a peptide oligonucleotide complex comprising a PD-L1-binding peptide and a nucleotide that binds a gene target mRNA) that target cancer gene targets may be used to treat various cancers, including solid tumors. Developmental regulators, such as transcription factors involved in early cell fate and pluripotency, and chromatin remodeling enzymes, may be targeted to specifically harm de-differentiated cells which may be present in advanced tumors and associated with a more mobile and/or mitotic cell state. A peptide oligonucleotide construct targeting a cancer target may treat or prevent cancer by reducing oncogenic signaling, reducing target over-expression, reducing oncogenic antisense activity (e.g., miRNAs targeting tumor suppressors), and/or eliminating the source of the oncogenic signaling cascade.

[0359] Examples of gene targets (e.g., gastrointestinal, or cancer gene targets) are provided in TABLE 10.

TABLE 10
Examples of Disease-Specific Gene Targets

| Type/Target | Target Gene | Associated Disorders |
|---|---|---|
| Gastrointestinal | Pro-inflammatory genes | IBD, Ulcerative Colitis, Crohn's Disease |
| Gastrointestinal | ECM-modifying genes | IBD, Ulcerative Colitis, Crohn's Disease |
| Gastrointestinal | Immune cell recruitment genes | IBD, Ulcerative Colitis, Crohn's Disease |
| Gastrointestinal | TNF-α | IBD, Ulcerative Colitis, Crohn's Disease |
| Gastrointestinal | ICAM-1 | IBD, Ulcerative Colitis, Crohn's Disease |
| Gastrointestinal | NF-κB | IBD, Ulcerative Colitis, Crohn's Disease |
| Gastrointestinal | NF-κB subunits | IBD, Ulcerative Colitis, Crohn's Disease |
| Gastrointestinal | NF-κB p65 subunit | IBD, Ulcerative Colitis, Crohn's Disease |
| Gastrointestinal | Smad7 | IBD, Ulcerative Colitis, Crohn's Disease |
| Gastrointestinal | Carbohydrate Sulfotransferase | IBD, Ulcerative Colitis, Crohn's Disease |
| | 15 (CHST15) | |
| Gastrointestinal | IL-23 | IBD, Ulcerative Colitis, Crohn's Disease |
| Gastrointestinal | IL-12 | IBD, Ulcerative Colitis, Crohn's Disease |
| Gastrointestinal | IL-17 | IBD, Ulcerative Colitis, Crohn's Disease |
| Cancer Cells | Insulin-like Growth Factor 1 | Cancers, Solid Tumors |
| | (IGF-1) | |
| Cancer Cells | IGF-1 Receptor | Cancers, Solid Tumors |
| Cancer Cells | Androgen Receptor | Cancers, Solid Tumors |
| Cancer Cells | EGFR | Cancers, Solid Tumors |
| Cancer Cells | EGFR Isoforms | Cancers, Solid Tumors |
| Cancer Cells | EGFRvIII Isoform | Cancers, Solid Tumors |
| Cancer Cells | ERBB3 | Cancers, Solid Tumors |
| Cancer Cells | HER2 | Cancers, Solid Tumors |
| Cancer Cells | GRB2 | Cancers, Solid Tumors |
| Cancer Cells | KRAS | Cancers, Solid Tumors |
| Cancer Cells | Mutant KRAS | Cancers, Solid Tumors |
| Cancer Cells | KRAS-G12D | Cancers, Solid Tumors |
| Cancer Cells | MYC | Cancers, Solid Tumors |
| Cancer Cells | YAP1 | Cancers, Solid Tumors |
| Cancer Cells | Heat Shock Proteins | Cancers, Solid Tumors |
| Cancer Cells | HSP90 | Cancers, Solid Tumors |
| Cancer Cells | HSP70 | Cancers, Solid Tumors |
| Cancer Cells | HSP27 | Cancers, Solid Tumors |
| Cancer Cells | Hypoxia-sensing Proteins | Cancers, Solid Tumors |
| Cancer Cells | HIF1A | Cancers, Solid Tumors |
| Cancer Cells | HIF2A | Cancers, Solid Tumors |
| Cancer Cells | Pro-Inflammatory Cytokines | Cancers, Solid Tumors |
| Cancer Cells | IL-12 | Cancers, Solid Tumors |
| Cancer Cells | IL-12 mRNA | Cancers, Solid Tumors |
| Cancer Cells | TGF1B | Cancers, Solid Tumors |
| Cancer Cells | miR-21 mRNA | Cancers, Solid Tumors |
| Cancer Cells | MDM2 | Cancers, Solid Tumors |
| Cancer Cells | BCL2 | Cancers, Solid Tumors |
| Cancer Cells | FOXP3 | Cancers, Solid Tumors |
| Cancer Cells | DNMT1 | Cancers, Solid Tumors |
| Cancer Cells | HDACs | Cancers, Solid Tumors |
| Cancer Cells | Myb | Cancers, Solid Tumors |
| Cancer Cells | Fos | Cancers, Solid Tumors |
| Cancer Cells | Jun | Cancers, Solid Tumors |
| Blasts | NUP98-KDM5A | Erythroleukemia |
| | NTRK1 | |
| | JAK2, K-/N-RAS | |
| Blasts | JAK-STAT pathway; | Acute myeloid leukemia |
| | Hedgehog pathway; | |
| | PI3K/AKT pathway; | |
| | RAF/MEK/ERK pathway; | |
| | mTOR pathway | |
| varies | JAK-STAT pathway | Myeloproliferative neoplasms |
| | HDAC | |
| | MDM2, LSD1, CALR | |
| Uroepithelial | Viral sequences | BK virus |
| cells | | |
| Varies | Viral sequences | MS |
| Microglia, | Proinflammatory mediators, | Parkinson's Disease |
| astrocytes | such as IL1b, IL6, TNFa, | |
| | IFNg, chemokines | |
| Neurons | LRRK2 | Parkinson's Disease |
| Myocytes | Myostatin | Muscular disorders |
| Eye | HCMV | CMV retinitis |
| Eye | VEGF-165 | Neovascular age-related macular |
| | | degeneration |
| Liver | APOB | Hypercholesterolemia |
| Spinal cord | SMN2 | SMA |
| Muscle | DMD | DMD |
| Muscle | DMD | DMD |
| Muscle | DMD | DMD |
| Muscle | DMD | DMD |
| Kidney | miR-17 | ADPKD |
| Muscle | DMPK | DM1 |
| Liver | TTR | Transthyretin-mediated amyloidosis |
| Liver | TTR | Transthyretin-mediated amyloidosis |
| Liver | TTR | Transthyretin-mediated amyloidosis |
| Liver | TTR | Transthyretin-mediated amyloidosis |
| Liver | APOC-III | Familial chylomicronemia syndrome |
| Liver | SERPINC1 | Hemophilia A + B |
| Liver, kidney | HAO1 | Primary hyperoxaluria type 1 |
| Liver | ALAS1 | Acute hepatic porphyria |
| Eye | LCA10 | Leber's congenital amaurosis type 10 |
| Liver | ApoA | CVD |
| Liver | PCSK9 | CVD |
| Liver | APOC-III | CVD |
| GI | ICAM-1 | UC |
| Platelet cells | Factor XI | Clotting disorder |
| Pancreas | GCGR | Type II diabetes |
| Liver | DGAT2 | NASH |
| Cancer Cells | HSP27 | Cancer, solid tumors |
| Cancer Cells | STAT3 | Cancer |
| Cancer Cells | AR | Cancer |
| Cancer Cells | miR-155 | Cancer |
| Cancer Cells | GRB2 | Cancer, AML |
| Cancer Cells | TGFB2 | Cancer, glioma, prostate cancer |
| Muscle | CD49d | MS, DMD |
| | GHR | Acromegaly |
| | HBV surface antigen | Hepatitis B |
| Muscle | DNM2 | Centronuclear myopathy |
| Lungs | ENAC | Cystic fibrosis |
| | ANGPTL3 | Dyslipidemia |
| | AGT | Hypertension |
| Kidney | Factor B | Primary IgA nephropathy |
| | Kallikrein B1 | Hereditary angioedema |
| Eye | RHO | Retinitis pigmentosa |
| Eye | USH2A | Retinitis pigmentosa |
| Skin | COL7A1 | Dystrophic epidermolysis bullosa |
| Kidney | miR-21 | Alport syndrome |
| Skin | IL17RA | Psoriasis |

[0360] In some embodiments, an oligonucleotide may target a gene for downregulation. For example, PvRBSA, PvRBP2b, PfEMP1, pfmdr1, pfgchl, GPX4, SLC7a11, alpha-synuclein, PD-L1, NUP98-KDM5A, NTRK1, JAK2, K-/N-RAS, the JAK-STAT pathway, the Hedgehog pathway, the PI3K/AKT pathway, the RAF/MEK/ERK pathway, the mTOR pathway, HDAC, MDM2, LSD1, CALR, PKC, NF-κB, HSP90, HIV Tat, TNF-α, CCR2, CCR5, TAR (tat), RRE (rev), vpr, U5 leader, Nef, Gag, Vif, Env, IL1b, IL6, TNFα, IFNg, LRRK2, or Myostatin may be targeted for downregulation.

[0361] An example of an antagomir that may be complexed with a PD-L1-binding peptide to target a gene includes cobomarsen. An example of an aptamer that may be complexed with a PD-L1-binding peptide to target a gene includes pegaptanib. Examples of gapmers that may be complexed with a PD-L1-binding peptide to target a gene include fomivirsen, mipomersen, inotersen, volanesorsen, tofersen, tominersen, pelacarsen, alicaforsen, apatorsen, and trabedersen. Examples of siRNAs that may be complexed with a PD-L1-binding peptide to target a gene include patisiran, vutrisiran, revusiran, fitusiran, lumasiran, givosiran, and inclisiran. Examples of splice blockers that may be complexed with a PD-L1-binding peptide to target a gene include nusinersen, eteplirsen, golodirsen, viltolarsen, casimersen, and sepofarsen. An example of a translation blocker that may be complexed with a PD-L1-binding peptide to target a gene includes prexigebersen.

[0362] Any targets for the nucleic acid portion of the peptide oligonucleotide complex described herein can be used in conjunction with a U1 adapter to degrade targeted mRNAs. The target recognition (or complementary nucleic acid to the target mRNA) portion directs the peptide oligonucleotide complex to the targeted mRNA selected for degradation, while the U1 portion prevents the addition of polyA to the mRNA resulting in degradation of the targeted mRNA. U1 adapters can comprise any nucleotide sequence complementary to the ssRNA component of the U1 small nuclear ribonucleoprotein (U1 snRNP). In some embodiments, the U1 adapter sequences engage the U1 snRNP near its poly A site. In some embodiments, the length of the U1 adapter is 15 to 25 nt in length, or about 20 nt in length. In some embodiments, the U1 adapter is above 40% in its G/C content. Exemplary U1 adapters are shown in TABLE 11, in conjunction with a target nucleic acid “target recognition” portion which comprises a nucleotide sequence is single stranded (ssDNA, ssRNA) or double stranded (dsDNA, dsRNA) or a combination of single and double stranded (for example with a mismatched sequence, hairpin or other structure), an antisense RNA, complementary RNA, inhibitory RNA, interfering RNA, nuclear RNA, antisense oligonucleotide (ASO), microRNA (miRNA), an oligonucleotide complementary to a natural antisense transcripts (NATs) sequences, siRNA, snRNA, aptamer, gapmer, anti-miR, or splice blocker ASO. The 10-19 nt U1 Adapter is italicized.

TABLE 11
Examples of Target Recognition
Constructs with U1 Adapters

| 5′-Nucleic Acid complementary | |
|---|---|
| to Target mRNA-U1 Adapter-3′ | SEQ ID NO: |
| 5′-[Target_recognition]UCCC | SEQ ID NO: 366 |
| CUGCCAGGUAAGUAU-3′ [19 nt] | |
| 5′-[Target_recognition]CCCU | SEQ ID NO: 367 |
| GCCAGGUAAGUAU-3′ [17 nt] | |
| 5′-[Target_recognition]CUGC | SEQ ID NO: 553 |
| CAGGUAAGUAU-3′ [15 nt] | |
| 5′-[Target_recognition]UGCC | SEQ ID NO: 368 |
| AGGUAAGUAU-3′ [14 nt] | |
| 5′-[Target_recognition]GCCA | SEQ ID NO: 370 |
| GGUAAGUAU-3′ [13 nt] | |
| 5′-[Target_recognition]CCAG | SEQ ID NO: 371 |
| GUAAGUAU-3′ [12 nt] | |
| 5′-[Target_recognition]CAGG | SEQ ID NO: 372 |
| UAAGUAU-3′ [11 nt] | |
| 5′-[Target_recognition]CAGG | SEQ ID NO: 373 |
| UAAGUA-3′ [10 nt] | |

[0363] Exemplary U1 adapters include: UCCCCUGCCAGGUAAGUAU (SEQ ID NO: 366); CCCUGCCAGGUAAGUAU (SEQ ID NO: 367); CUGCCAGGUAAGUAU (SEQ ID NO: 368); UGCCAGGUAAGUAU (SEQ ID NO: 369); GCCAGGUAAGUAU (SEQ ID NO: 370); CCAGGUAAGUAU (SEQ ID NO: 371); CAGGUAAGUAU (SEQ ID NO: 372); and CAGGUAAGUA (SEQ ID NO: 373).

### Detectable Labeling and Imaging

[0364] A PD-L1-binding peptide complex of the present disclosure (e.g., a complex comprising a peptide of any one of SEQ ID NO: 1-SEQ ID NO: 118, SEQ ID NO: 435, SEQ ID NO: 436, or SEQ ID NO: 554-SEQ ID NO: 567 complexed with a detectable agent) may be used in a method of labeling a cell, region, or tissue of interest in a subject. Upon administration, the PD-L1-binding peptide complex may target and bind to PD-L1 (e.g., on a PD-L1 positive cell) and deliver the detectable agent to the cell, tissue, or region containing the PD-L1. The detectable agent of the peptide complex may produce a detectable signal and may be used to label a cell or tissue (e.g., a PD-L1 positive cell or tissue). In some embodiments, producing a detectable signal may comprise emitting a fluorescent light (e.g., a visible, ultraviolet, or infrared light), emitting electromagnetic radiation, absorbing electromagnetic radiation (e.g., light or X-rays), producing a contrast signal, producing an electron spin signal, emitting radiation, producing a magnetic signal, or combinations thereof. Examples of detectable agents that may be complexed with a PD-L1-binding peptide of the present disclosure include fluorophores, near-infrared dyes, contrast agents, nanoparticles, metal-containing nanoparticles, metal chelates, X-ray contrast agents, PET agents, radionuclides, or radionuclide chelators.

[0365] Delivery of a detectable agent to a PD-L1 positive region may be used in a method of diagnosing a disease or condition in a subject, for example a condition associated with PD-L1. For example, a PD-L1-binding peptide complex comprising a detectable agent may be administered to a subject who has or is suspected of having cancer. The peptide complex may target and bind to PD-L1 positive cancer cells, thereby labeling the PD-L1 positive cancer cells. The presence and location of the detectable agent may be imaged to diagnose the cancer.

### Immune Cell Recruitment

[0366] A PD-L1-binding peptide complex of the present disclosure (e.g., a complex comprising a peptide of any one of SEQ ID NO: 1-SEQ ID NO: 118, SEQ ID NO: 435, SEQ ID NO: 436, or SEQ ID NO: 554-SEQ ID NO: 567 complexed with an immune cell targeting agent) may be used in a method of recruiting an immune cell to a PD-L1 positive cell, tissue, or region. The PD-L1-binding peptide complex may comprise a bispecific immune cell engager. Upon administration, the bispecific immune cell engager may bind to a PD-L1 positive cell via the PD-L1-binding peptide and to an immune cell (e.g., a T cell, a B cell, a macrophage, a natural killer cell, a fibroblast, a regulatory T cell, a regulatory immune cell, a neural stem cell, or a mesenchymal stem cell) via the immune cell targeting agent. The bispecific immune cell engager may recruit the immune cell to the PD-L1 positive cell. In some embodiments, recruitment of the immune cell may stimulate an immune response against the target cell. For example, recruitment of a T cell, an NK cell, a macrophage, a fibroblast, a regulatory immune cell, a neural stem cell, or a mesenchymal stem cell to a PD-L1 positive cancer cell may induce a host immune response against the cancer cell or otherwise therapeutically modulate the microenvironment around PD-L1-positive tissue. In some embodiments, recruitment of the immune cell may inhibit an immune response against the target cell. For example, recruitment of a regulatory T cell (T_{reg}) to a pancreatic beta cell may protect the pancreatic beta cell and prevent the onset of type 1 diabetes. Type 1 diabetes occurs when T cells engage with insulin-producing pancreatic beta cells and attack them as an autoimmune disorder. Recruitment of T_{reg} cells to islets via dual engagement of PD-L1+beta cells and T_{reg} cells may reduce this autoimmune destruction of beta cells. In another example, recruitment of a regulatory T cell or a natural killer cell to a T cell involved in an autoimmune response may inhibit the autoimmune response and treat an autoimmune disorder. Regulatory T cells recruited to inflammatory tissue may produce anti-inflammatory signaling, thereby reducing inflammation at the site of the inflammatory tissue. Producing anti-inflammatory signaling at the site of PD-L1-positive pancreatic islet cells being invaded by activated T cells may delay, slow progression of, or reverse type 1 diabetes. In some embodiments, a BiICE comprising a PD-L1-binding peptide (e.g., a peptide of any one of SEQ ID NO: 1-SEQ ID NO: 118, SEQ ID NO: 435, SEQ ID NO: 436, or SEQ ID NO: 554-SEQ ID NO: 567) may be used in a method of recruiting a regulatory T cell or a natural killer cell to a PD-L1 positive cell, tissue, or region complexed with a regulatory T cell- or a natural killer cell-binding moiety. Recruitment of a neural stem cell may treat a site or neuronal injury. Recruitment of anti-inflammatory, regulatory immune cells (e.g. Tregs) can be helpful in chronic infection or sepsis or acute infection. A bispecific immune cell engager utilizing a PD-L1-binding peptide may also be administered to treat a cancer (e.g., melanoma, skin cancer, non-small cell lung cancer, small cell lung cancer, renal cancer, esophageal cancer, oral cancer, hepatocellular cancer, ovarian cancer, cervical cancer, colorectal cancer, colon cancer, rectal cancer, head and neck cancer, lymphoma, bladder cancer, liver cancer, gastric cancer, stomach cancer, breast cancer, pancreatic cancer, prostate cancer, Merkel cell carcinoma, mesothelioma, or brain cancer, including primary brain cancer or metastatic brain cancer, a PDL1-expressing cancer, a primary cancer, a metastatic cancer), an autoimmune or inflammatory disease (e.g., rheumatoid arthritis, atherosclerosis, ischemia-reperfusion injury, colitis, psoriasis, lupus, inflammatory bowel disease, Crohn's disease, ulcerative colitis, multiple sclerosis, type 1 diabetes, or neuroinflammation), hyperglycemia, type 2 diabetes, infection, or neuronal injury.

### CAR T-Cell Therapy

[0367] A PD-L1-binding peptide complex of the present disclosure (e.g., chimeric antigen receptor comprising a PD-L1-binding peptide of any one of SEQ ID NO: 1-SEQ ID NO: 118, SEQ ID NO: 435, SEQ ID NO: 436, or SEQ ID NO: 554-SEQ ID NO: 567) may be used in a method of recruiting a T cell to a PD-L1 positive cell, tissue, or region. For example, a PD-L1-binding chimeric antigen receptor (CAR) may be used in a CAR T-cell therapy. The PD-L1-binding chimeric antigen receptor may be expressed in a T cell (e.g., a T cell collected from a subject), and T cells expressing the CAR may be administered back to the subject. The PD-L1-binding peptide of the CAR may deliver the T cell to a PD-L1 positive cell of the subject (e.g., a PD-L1 positive cancer cell). The CAR T-cell may stimulate an immune response against the PD-L1 positive cell. In some embodiments, a PD-L1-binding CAR may be administered to treat a cancer (e.g., melanoma, skin cancer, non-small cell lung cancer, small cell lung cancer, renal cancer, esophageal cancer, oral cancer, hepatocellular cancer, ovarian cancer, cervical cancer, colorectal cancer, colon cancer, rectal cancer, head and neck cancer, lymphoma, bladder cancer, liver cancer, gastric cancer, stomach cancer, breast cancer, pancreatic cancer, prostate cancer, Merkel cell carcinoma, mesothelioma, or brain cancer, including primary brain cancer or metastatic brain cancer, a PDL1-expressing cancer, a primary cancer, a metastatic cancer).

### Peptide Stability

[0368] A peptide of the present disclosure can be stable in various biological or physiological conditions, such as physiologic extracellular pH, endosomal or lysosomal pH, or reducing environments inside a cell, in the cytosol, in a cell nucleus, or endosome or a tumor. For example, any peptide or peptide complex comprising any of SEQ ID NO: 1-SEQ ID NO: 118, SEQ ID NO: 435, SEQ ID NO: 436, or SEQ ID NO: 554-SEQ ID NO: 567 can exhibit resistance to reducing agents, proteases, oxidative conditions, or acidic conditions.

[0369] In some cases, biologic molecules (such as peptides and proteins) can provide therapeutic functions, but such therapeutic functions are decreased or impeded by instability caused by the in vivo environment. (Moroz et al. Adv Drug Deliv Rev 101:108-21 (2016), Mitragotri et al. Nat Rev Drug Discov 13(9):655-72 (2014), Bruno et al. Ther Deliv (11):1443-67 (2013), Sinha et al. Crit Rev Ther Drug Carrier Syst. 24(1):63-92 (2007), Hamman et al. BioDrugs 19(3):165-77 (2005)). For instance, the GI tract can contain a region of low pH (e.g. pH˜1), a reducing environment, or a protease-rich environment that can degrade peptides and proteins. Proteolytic activity in other areas of the body, such as the mouth, eye, lung, intranasal cavity, joint, skin, vaginal tract, mucous membranes, and serum, can also be an obstacle to the delivery of functionally active peptides and polypeptides. Additionally, the half-life of peptides in serum can be very short, in part due to proteases, such that the peptide can be degraded too quickly to have a lasting therapeutic effect when administering reasonable dosing regimens. Likewise, proteolytic activity in cellular compartments such as lysosomes and reduction activity in lysosomes and the cytosol can degrade peptides and proteins such that they can be unable to provide a therapeutic function on intracellular targets. Therefore, peptides that are resistant to reducing agents, proteases, and low pH can be able to provide enhanced therapeutic effects or enhance the therapeutic efficacy of co-formulated or conjugated, linked, or fused active agents in vivo.

[0370] Additionally, oral delivery of drugs can be desirable in order to target certain areas of the body (e.g., disease in the GI tract such as colon cancer, irritable bowel disorder, infections, metabolic disorders, and constipation) despite the obstacles to the delivery of functionally active peptides and polypeptides presented by this method of administration. For example, oral delivery of drugs can increase compliance by providing a dosage form that is more convenient for patients to take as compared to parenteral delivery. Oral delivery can be useful in treatment regimens that have a large therapeutic window. Therefore, peptides that are resistant to reducing agents, proteases, and low pH can allow for oral delivery of peptides without nullifying their therapeutic function.

[0371] Peptide Resistance to Reducing Agents. PD-L1-binding peptides or peptide complexes of this disclosure can contain one or more cysteines, which can participate in disulfide bridges that can be integral to preserving the folded state of the peptide. Exposure of peptides to biological environments with reducing agents can result in unfolding of the peptide and loss of functionality and bioactivity. For example, glutathione (GSH) is a reducing agent that can be present in many areas of the body, in the blood, and inside cells and can reduce disulfide bonds. As another example, a peptide can become reduced during trafficking of a peptide across the gastrointestinal epithelium after oral administration. A peptide can become reduced upon exposure to various parts of the GI tract. The GI tract can be a reducing environment, which can inhibit the ability of therapeutic molecules with disulfide bonds to have optimal therapeutic efficacy, due to reduction of the disulfide bonds. A peptide can also be reduced upon entry into a cell, such as after internalization by endosomes or lysosomes or into the cytosol, or other cellular compartments. Reduction of the disulfide bonds and unfolding of the peptide can lead to loss of functionality or affect key pharmacokinetic parameters such as bioavailability, peak plasma concentration, bioactivity, and half-life. Reduction of the disulfide bonds can also lead to loss of functionality due to increased susceptibility of the peptide to subsequent degradation by proteases, resulting in rapid loss of intact peptide after administration. In some embodiments, a peptide that is resistant to reduction can remain intact and can impart a functional activity for a longer period of time in various compartments of the body and in cells, as compared to a peptide that is more readily reduced.

[0372] In certain embodiments, the peptides of this disclosure can be analyzed for the characteristic of resistance to reducing agents to identify stable peptides. In some embodiments, the peptides of this disclosure can remain intact after being exposed to different molarities of reducing agents such as 0.00001 M-0.0001 M, 0.0001 M-0.001 M, 0.001 M-0.01 M, 0.01 M-0.05 M, 0.05 M-0.1 M, or 0.1 M to 0.2 M for 15 minutes or more. In some embodiments, the reducing agent used to determine peptide stability can be dithiothreitol (DTT), Tris(2-carboxyethyl)phosphine HCl (TCEP), 2-Mercaptoethanol, (reduced) glutathione (GSH), or any combination thereof. In some embodiments, at least 5%-10%, at least 10%-20%, at least 20%-30%, at least 30%-40%, at least 40%-50%, at least 50%-60%, at least 60%-70%, at least 70%-80%, at least 80%-90%, or at least 90%-100% of the peptide remains intact after exposure to a reducing agent. In some embodiments, peptides are completely resistant to GSH reducing conditions and are partially resistant to degradation in DTT reducing conditions. In some embodiments, peptides described herein can withstand or are resistant to degradation in physiological reducing conditions.

[0373] Peptide Resistance to Proteases. The stability of peptides of this disclosure can be determined by resistance to degradation by proteases. Proteases, also referred to as peptidases or proteinases, are enzymes that can degrade peptides and proteins by breaking bonds between adjacent amino acids. Families of proteases with specificity for targeting specific amino acids can include serine proteases, cysteine proteases, threonine proteases, aspartic proteases, glutamic proteases, and asparagine proteases. Additionally, metalloproteases, matrix metalloproteases, elastase, carboxypeptidases, Cytochrome P450 enzymes, and cathepsins can also digest peptides and proteins. Proteases can be present at high concentration in blood, in mucous membranes, lungs, skin, the GI tract, the mouth, nose, eye, and in compartments of the cell. Misregulation of proteases can also be present in various diseases such as rheumatoid arthritis and other immune disorders. Degradation by proteases can reduce bioavailability, biodistribution, half-life, and bioactivity of therapeutic molecules such that they are unable to perform their therapeutic function. In some embodiments, peptides that are resistant to proteases can better provide therapeutic activity at reasonably tolerated concentrations in vivo.

[0374] In some embodiments, peptides of this disclosure can resist degradation by any class of protease. In certain embodiments, peptides of this disclosure resist degradation by pepsin (which can be found in the stomach), trypsin (which can be found in the duodenum), serum proteases, or any combination thereof. In some embodiments, the proteases used to determine peptide stability can be pepsin, trypsin, chymotrypsin, or any combination thereof. In certain embodiments, peptides of this disclosure can resist degradation by lung proteases (e.g., serine, cysteinyl, and aspartyl proteases, metalloproteases, neutrophil elastase, alpha-1 antitrypsin, secretory leucoprotease inhibitor, and elafin), or any combination thereof. In some embodiments, at least 5%-10%, at least 10%-20%, at least 20%-30%, at least 30%-40%, at least 40%-50%, at least 50%-60%, at least 60%-70%, at least 70%-80%, at least 80%-90%, or at least 90%-100% of the peptide remains intact after exposure to a protease.

[0375] Peptide Stability in Acidic Conditions. Peptides of this disclosure can be administered in biological environments that are acidic. For example, after oral administration, peptides can experience acidic environmental conditions in the gastric fluids of the stomach and gastrointestinal (GI) tract. The pH of the stomach can range from about 1-4 and the pH of the GI tract ranges from acidic to normal physiological pH descending from the upper GI tract to the colon. In addition, the vagina, late endosomes, and lysosomes can also have acidic pH values, such as less than pH 7. These acidic conditions can lead to denaturation of peptides and proteins into unfolded states. Unfolding of peptides and proteins can lead to increased susceptibility to subsequent digestion by other enzymes as well as loss of biological activity of the peptide. In certain embodiments, the peptides of this disclosure can resist denaturation and degradation in acidic conditions and in buffers, which simulate acidic conditions. In certain embodiments, peptides of this disclosure can resist denaturation or degradation in buffer with a pH less than 1, a pH less than 2, a pH less than 3, a pH less than 4, a pH less than 5, a pH less than 6, a pH less than 7, or a pH less than 8. In some embodiments, peptides of this disclosure remain intact at a pH of 1-3. In certain embodiments, at least 5%-10%, at least 10%-20%, at least 20%-30%, at least 30%-40%, at least 40%-50%, at least 50%-60%, at least 60%-70%, at least 70%-80%, at least 80%-90%, or at least 90%-100% of the peptide remains intact after exposure to a buffer with a pH less than 1, a pH less than 2, a pH less than 3, a pH less than 4, a pH less than 5, a pH less than 6, a pH less than 7, or a pH less than 8. In other embodiments, at least 5%-10%, at least 10%-20%, at least 20%-30%, at least 30%-40%, at least 40%-50%, at least 50%-60%, at least 60%-70%, at least 70%-80%, at least 80%-90%, or at least 90%-100% of the peptide remains intact after exposure to a buffer with a pH of 1-3. In other embodiments, the peptides of this disclosure can be resistant to denaturation or degradation in simulated gastric fluid (pH 1-2). In some embodiments, at least 5%-10%, at least 10%-20%, at least 20%-30%, at least 30%-40%, at least 40%-50%, at least 50%-60%, at least 60%-70%, at least 70%-80%, at least 80%-90%, or at least 90%-100% of the peptide remains intact after exposure to simulated gastric fluid. In some embodiments, low pH solutions such as simulated gastric fluid can be used to determine peptide stability.

[0376] In some embodiments, the peptides described herein are resistant to degradation in vivo, in the serum of a subject, or inside a cell. In some embodiments, the peptides are stable at physiological pH ranges, such as about pH 7, about pH 7.5, between about pH 5 to 7.5, between about 6.5 to 7.5, between about pH 5 to 8, or between about pH 5 to 7. In some embodiments, the peptides described herein are stable in acidic conditions, such as less than or equal to about pH 5, less than or equal to about pH 3, or within a range from about 3 to about 5. In some embodiments, the peptides are stable in conditions of an endosome or lysosome, or inside a nucleus.

[0377] Peptide Stability at High Temperatures. Peptides of this disclosure can be administered in biological environments with high temperatures. For example, after oral administration, peptides can experience high temperatures in the body. Body temperature can range from 36° C. to 40° C. High temperatures can lead to denaturation of peptides and proteins into unfolded states. Unfolding of peptides and proteins can lead to increased susceptibility to subsequent digestion by other enzymes as well as loss of biological activity of the peptide. In some embodiments, a peptide of this disclosure can remain intact at temperatures from 25° C. to 100° C. High temperatures can lead to faster degradation of peptides. Stability at a higher temperature can allow for storage of the peptide in tropical environments or areas where access to refrigeration is limited. In certain embodiments, 5%-100% of the peptide can remain intact after exposure to 25° C. for 6 months to 5 years. 5%-100% of a peptide can remain intact after exposure to 70° C. for 15 minutes to 1 hour. 5%-100% of a peptide can remain intact after exposure to 100° C. for 15 minutes to 1 hour. In other embodiments, at least 5%-10%, at least 10%-20%, at least 20%-30%, at least 30%-40%, at least 40%-50%, at least 50%-60%, at least 60%-70%, at least 70%-80%, at least 80%-90%, or at least 90%-100% of the peptide remains intact after exposure to 25° C. for at least 6 months to 5 years. In other embodiments, at least 5%-10%, at least 10%-20%, at least 20%-30%, at least 30%-40%, at least 40%-50%, at least 50%-60%, at least 60%-70%, at least 70%-80%, at least 80%-90%, or at least 90%-100% of the peptide remains intact after exposure to 70° C. for 15 minutes to 1 hour. In other embodiments, at least 5%-10%, at least 10%-20%, at least 20%-30%, at least 30%-40%, at least 40%-50%, at least 50%-60%, at least 60%-70%, at least 70%-80%, at least 80%-90%, or at least 90%-100% of the peptide remains intact after exposure to 100° C. for 15 minutes to 1 hour.

### Methods of Manufacture

[0378] Various expression vector/host systems can be utilized for the recombinant expression of peptides described herein. Non-limiting examples of such systems include microorganisms such as bacteria transformed with recombinant bacteriophage DNA, plasmid DNA or cosmid DNA expression vectors containing a nucleic acid sequence encoding peptides, peptide complexes, or peptide fusion proteins/chimeric proteins described herein, yeast transformed with recombinant yeast expression vectors containing the aforementioned nucleic acid sequence, insect cell systems infected with recombinant virus expression vectors (e.g., baculovirus) containing the aforementioned nucleic acid sequence, plant cell systems infected with recombinant virus expression vectors (e.g., cauliflower mosaic virus (CaMV), tobacco mosaic virus (TMV)), or transformed with recombinant plasmid expression vectors (e.g., Ti plasmid) containing the aforementioned nucleic acid sequence, or animal cell systems infected with recombinant virus expression vectors (e.g., adenovirus, vaccinia virus, lentivirus) including cell lines engineered to contain multiple copies of the aforementioned nucleic acid sequence, either stably amplified (e.g., CHO/dhfr, CHO/glutamine synthetase) or unstably amplified in double-minute chromosomes (e.g., murine cell lines). Disulfide bond formation and folding of the peptide could occur during expression or after expression or both.

[0379] A host cell can be adapted to express one or more peptides described herein. The host cells can be prokaryotic, eukaryotic, or insect cells. In some cases, host cells are capable of modulating the expression of the inserted sequences or modifying and processing the gene or protein product in the specific fashion desired. For example, expression from certain promoters can be elevated in the presence of certain inducers (e.g., zinc and cadmium ions for metallothionine promoters). In some cases, modifications (e.g., phosphorylation) and processing (e.g., cleavage) of peptide products can be important for the function of the peptide. Host cells can have characteristic and specific mechanisms for the post-translational processing and modification of a peptide. In some cases, the host cells used to express the peptides secrete minimal amounts of proteolytic enzymes.

[0380] The PD-L1-binding peptides or peptide complexes of this disclosure can be advantageously made by a single recombinant expression system, with no need for chemical synthesis or modifications. For example, a PD-L1-binding peptide or peptide complex can be expressed in CHO cells, yeast, pichia, E. coli, or other organisms.

[0381] In the case of cell- or viral-based samples, organisms can be treated prior to purification to preserve and/or release a target polypeptide. In some embodiments, the cells are fixed using a fixing agent. In some embodiments, the cells are lysed. The cellular material can be treated in a manner that does not disrupt a significant proportion of cells, but which removes proteins from the surface of the cellular material, and/or from the interstices between cells. For example, cellular material can be soaked in a liquid buffer, or, in the case of plant material, can be subjected to a vacuum, in order to remove proteins located in the intercellular spaces and/or in the plant cell wall. If the cellular material is a microorganism, proteins can be extracted from the microorganism culture medium. Alternatively, the peptides can be packed in inclusion bodies. The inclusion bodies can further be separated from the cellular components in the medium. In some embodiments, the cells are not disrupted. A cellular or viral peptide that is presented by a cell or virus can be used for the attachment and/or purification of intact cells or viral particles. In addition to recombinant systems, peptides can also be synthesized in a cell-free system prior to extraction using a variety of known techniques employed in protein and peptide synthesis.

[0382] In some cases, a host cell produces a peptide that has an attachment point for a cargo molecule (e.g., a therapeutic agent). An attachment point could comprise a lysine residue, an N-terminus, a cysteine residue, a cysteine disulfide bond, a glutamic acid or aspartic acid residue, a C-terminus, or a non-natural amino acid. The peptide could also be produced synthetically, such as by solid-phase peptide synthesis, or solution-phase peptide synthesis. Peptide synthesis can be performed by fluorenylmethyloxycarbonyl (Fmoc) chemistry or by butyloxycarbonyl (Boc) chemistry. The peptide could be folded (formation of disulfide bonds) during synthesis or after synthesis or both. Peptide fragments could be produced synthetically or recombinantly. Peptide fragments can be then be joined together enzymatically or synthetically.

[0383] In other aspects, the peptides of the present disclosure can be prepared by conventional solid phase chemical synthesis techniques, for example according to the Fmoc solid phase peptide synthesis method (“Fmoc solid phase peptide synthesis, a practical approach,” edited by W. C. Chan and P. D. White, Oxford University Press, 2000).

[0384] Nucleic acids, including RNA and DNA polynucleotides, used in the peptide nucleotide complexes described therein can also be produced using the methods described in U.S. Pat. No. 9,279,149, and is incorporated herein by reference. In some embodiments, RNA or DNA polynucleotides are synthesized by enzymatic/PCR methods. For example, RNA polynucleotides can be synthesized using an enzyme, such as a nucleotidyl transferase (e.g., E. coli poly(A) polymerase or E. coli poly(U) polymerase), which can add RNA nucleotides to the 3′ end. Alternatively, E. coli poly(U) polymerase can be used. A 3′ unblocked reversible terminator ribonucleotide triphosphates (rNTPs) can be used during polynucleotide synthesis. Alternatively, 3′blocked, 2′blocked, or 2′-3′ blocked rNTPs can be used alongside either enzyme described above. RNA or DNA polynucleotides can also be synthesized using standard solid-phase synthesis techniques and phosphoramidite-based methods or thiophosphorodiamidate methods. RNA or DNA polynucleotides of the present disclosure can be prepared by conventional solid phase oligonucleotide synthesis. For example any method of solid-phase synthesis can be employed including, but not limited to methods described, as shown at https://www.atdbio.com/content/17/Solid-phase-oligonucleotide-synthesis, and in Albericio (Solid-Phase Synthesis: A practical guide, CRC Press, 2000), Lambert et al. (Oligonucleotide Synthesis: Solid-Phase Synthesis, DNA, DNA Sequencing, RNA, Small Interfering RNA, Nucleoside, Nucleic Acid, Nucleotide, Phosphoramidite, Sense, Betascript Publishing, 2010), and Guzaev, A. P. et al. (Current Protocols in Nucleic Acid Chemistry. 2013; 53:3.1:3.1.1-3.1.60), each of which are incorporated herein by reference. Solid supports such as CPG or polystyrene can be used. Protected 2′-deoxynucleosides (dA, dC, dG, and T), ribonucleosides (A, C, G, and U), or chemically modified nucleosides, such as LNA or BNA can be used. Phosphoramidite chemistry can be used by cycling through the following steps: detritylation of the support-bound 3′-nucleoside, activation and coupling, capping, and oxidation. At the end of synthesis, the protected nucleotide can be cleaved from the support and then deprotected. The product can be purified by HPLC. Protecting groups used in solid-phase synthesis of RNA polynucleotides can include t-butyldimethylsilyl (TBDMS) or tri-iso-propylsilyloxymethyl (TOM). The RNA or DNA polynucleotides can have a modified backbone to enhance stability. Additionally, non-natural or modified bases can be used to serve as unique functional handles for subsequent chemical conjugation. In some embodiments, modification of the 5′ and or 3′ ends of the RNA or DNA can be performed to result in desired functional groups, stability, or activity. In some embodiments, the functional handles comprise modified bases including one or more modified uridine, modified guanosine, modified cytidine, or modified adenosine base of the RNA. An example of such modified base is a uridine with an extended amine. Nucleic acids, including a single stranded (ssDNA, ssRNA) or double stranded (dsDNA, dsRNA) or a combination of single and double stranded (for example with a mismatched sequence, hairpin or other structure), an antisense RNA, complementary RNA, inhibitory RNA, interfering RNA, nuclear RNA, antisense oligonucleotide (ASO), microRNA (miRNA), an oligonucleotide complementary to a natural antisense transcripts (NATs) sequences, siRNA, snRNA, aptamer, gapmer, anti-miR, splice blocker ASO, or U1 Adapter can be made using such methods. It may be advantageous to manufacture the oligonucleotide and the peptide by synthetic methods and then conjugate them together, with improved purity, safety, and cost of goods. Oligonucleotides, including modified oligonucleotides, may be manufactured by any of the methods disclosed in Glazier et al. Chemical synthesis and biological application of modified oligonucleotides. Bioconjugate Chemistry, 2020, 31, 1213-1233.

[0385] In some embodiments, the peptides of this disclosure can be more stable during manufacturing. For example, peptides of this disclosure can be more stable during recombinant expression and purification, resulting in lower rates of degradation by proteases that are present in the manufacturing process, a higher purity of peptide, a higher yield of peptide, or any combination thereof. In some embodiments, the peptides can also be more stable to degradation at high temperatures and low temperatures during manufacturing, storage, and distribution. For example, in some embodiments peptides of this disclosure can be stable at 25° C. In other embodiments, peptides of this disclosure can be stable at 70° C. or higher than 70° C. In some embodiments, peptides of this disclosure can be stable at 100° C. or higher than 100° C.

### Pharmaceutical Compositions

[0386] A pharmaceutical composition of the disclosure can be a combination of any peptide as described herein with other chemical components, such as carriers, stabilizers, diluents, dispersing agents, suspending agents, thickening agents, antioxidants, solubilizers, buffers, osmolytes (e.g., sugars, disaccharides and sugar alcohols), salts, surfactants, amino acids, encapsulating agents, bulking agents, cryoprotectants, and/or excipients. The pharmaceutical composition facilitates administration of a peptide described herein to an organism. In some cases, the pharmaceutical composition comprises factors that extend half-life of the peptide and/or help the peptide to penetrate the target cells. In some embodiments, a pharmaceutical composition comprises a cell modified to express and secrete a PD-L1-binding peptide or peptide complex of the present disclosure.

[0387] Pharmaceutical compositions can be administered in therapeutically-effective amounts as pharmaceutical compositions by various forms and routes including, for example, intravenous, subcutaneous, intramuscular, rectal, aerosol, parenteral, ophthalmic, pulmonary, transdermal, vaginal, optic, nasal, oral, sublingual, inhalation, dermal, intrathecal, intratumoral, intranasal, and topical administration. A pharmaceutical composition can be administered in a local or systemic manner, for example, via injection of the peptide described herein directly into an organ, optionally in a depot.

[0388] Parenteral injections can be formulated for bolus injection, infusion, or continuous infusion. The pharmaceutical compositions can be in a form suitable for parenteral injection as a sterile suspension, solution, or emulsion in oily or aqueous vehicles, and can contain formulatory agents such as suspending, stabilizing and/or dispersing agents. Pharmaceutical formulations for parenteral administration include aqueous solutions of a peptide described herein in water-soluble form. Suspensions of peptide-antibody complexes described herein can be prepared as oily injection suspensions. Suitable lipophilic solvents or vehicles include fatty oils such as sesame oil, or synthetic fatty acid esters, such as ethyl oleate or triglycerides, or liposomes. Aqueous injection suspensions can contain substances which increase the viscosity of the suspension, such as sodium carboxymethyl cellulose, sorbitol, or dextran. The suspension can also contain suitable stabilizers or agents which increase the solubility and/or reduce the aggregation of such peptide-antibody complexes described herein to allow for the preparation of highly concentrated solutions.

[0389] Alternatively, the peptide described herein can be lyophilized or in powder form for re-constitution with a suitable vehicle, e.g., sterile pyrogen-free water, before use. In some embodiments, a purified peptide is administered intravenously. A peptide described herein can be administered to a subject in order to home, target, migrate to, or be directed to a CNS cell, a brain cell, a cancerous cell, or a tumor. In some embodiments, a peptide can be conjugated to, linked to, or fused to another peptide that provides a targeting function to a specific target cell type in the central nervous system or across the blood brain barrier. Exemplary target cells include a CNS cell, erythrocyte, an erythrocyte precursor cell, an immune cell, a stem cell, a muscle cell, a brain cell, a thyroid cell, a parathyroid cell, an adrenal gland cell, a bone marrow cell, an appendix cell, a lymph node cell, a tonsil cell, a spleen cell, a muscle cell, a liver cell, a gallbladder cell, a pancreas cell, a cell of the gastrointestinal tract, a glandular cell, a kidney cell, a urinary bladder cell, an endothelial cell, an epithelial cell, a choroid plexus epithelial cell, a neuron, a glial cell, an astrocyte, or a cell associated with a nervous system.

[0390] A peptide of the disclosure can be applied directly to an organ, or an organ tissue or cells, such as brain or brain tissue or cells, during a surgical procedure. The recombinant peptide described herein can be administered topically and can be formulated into a variety of topically administrable compositions, such as solutions, suspensions, lotions, gels, pastes, medicated sticks, balms, creams, and ointments. Such pharmaceutical compositions can contain solubilizers, stabilizers, tonicity enhancing agents, buffers, and preservatives.

[0391] In practicing the methods of treatment or use provided herein, therapeutically effective amounts of a peptide described herein can be administered in pharmaceutical compositions to a subject suffering from a condition, such as a condition that affects the immune system. In some embodiments, the subject is a mammal such as a human or a primate. A therapeutically effective amount can vary widely depending on the severity of the disease, the age and relative health of the subject, the potency of the compounds used, and other factors.

[0392] In some embodiments, a peptide is cloned into a viral or non-viral expression vector. Such expression vector can be packaged in a viral particle, a virion, or a non-viral carrier or delivery mechanism, which is administered to patients in the form of gene therapy. In other embodiments, patient cells are extracted and modified to express a peptide capable of binding PD-L1 ex vivo before the modified cells are returned back to the patient in the form of a cell-based therapy, such that the modified cells will express the peptide once transplanted back in the patient.

[0393] Pharmaceutical compositions can be formulated using one or more physiologically acceptable carriers comprising excipients and auxiliaries, which facilitate processing of the active compounds into preparations that can be used pharmaceutically. Formulation can be modified depending upon the route of administration chosen. Pharmaceutical compositions comprising a peptide described herein can be manufactured, for example, by expressing the peptide in a recombinant system, purifying the peptide, buffer exchanging the peptide, lyophilizing the peptide, mixing, dissolving, granulating, dragee-making, levigating, emulsifying, encapsulating, entrapping, or compression processes. The pharmaceutical compositions can include at least one pharmaceutically acceptable carrier, diluent, or excipient and compounds described herein as free-base or pharmaceutically acceptable salt form.

[0394] Methods for the preparation of peptide described herein comprising the compounds described herein include formulating peptide described herein with one or more inert, pharmaceutically acceptable excipients or carriers to form a solid, semi-solid, or liquid composition. Solid compositions include, for example, powders, tablets, dispersible granules, capsules, cachets, and suppositories. These compositions can also contain minor amounts of nontoxic, auxiliary substances, such as wetting or emulsifying agents, pH buffering agents, and other pharmaceutically acceptable additives.

[0395] Non-limiting examples of pharmaceutically-acceptable excipients can be found, for example, in Remington: The Science and Practice of Pharmacy, Nineteenth Ed (Easton, Pa.: Mack Publishing Company, 1995); Hoover, John E., Remington's Pharmaceutical Sciences, Mack Publishing Co., Easton, Pennsylvania 1975; Liberman, H. A. and Lachman, L., Eds., Pharmaceutical Dosage Forms, Marcel Decker, New York, N.Y., 1980; and Pharmaceutical Dosage Forms and Drug Delivery Systems, Seventh Ed. (Lippincott Williams & Wilkins 1999), each of which is incorporated by reference in its entirety.

[0396] Pharmaceutical compositions can also include permeation or absorption enhancers (Aungst et al. AAPS J. 14(1):10-8. (2012) and Moroz et al. Adv Drug Deliv Rev 101:108-21. (2016)). Permeation enhancers can facilitate uptake of molecules from the GI tract into systemic circulation. Permeation enhancers can include salts of medium chain fatty acids, sodium caprate, sodium caprylate, N-(8-[2-hydroxybenzoyl]amino)caprylic acid (SNAC), N-(5-chlorosalicyloyl)-8-aminocaprylic acid (5-CNAC), hydrophilic aromatic alcohols such as phenoxyethanol, benzyl alcohol, and phenyl alcohol, chitosan, alkyl glycosides, dodecyl-2-N,N-dimethylamino propionate (DDAIPP), chelators of divalent cations including EDTA, EGTA, and citric acid, sodium alkyl sulfate, sodium salicylate, lecithin-based, or bile salt-derived agents such as deoxycholates.

[0397] Compositions can also include protease inhibitors including soybean trypsin inhibitor, aprotinin, sodium glycocholate, camostat mesilate, vacitracin, or cyclopentadecalactone.

### Kits

[0398] In one aspect, peptides described herein can be provided as a kit. In another embodiment, peptide complexes described herein can be provided as a kit. In another embodiment, a kit comprises amino acids encoding a peptide described herein, a vector, a host organism, and an instruction manual. In some embodiments, a kit includes written instructions on the use or administration of the peptides

[0399] Additional aspects and advantages of the present disclosure will become apparent to those skilled in this art from the following detailed description, wherein illustrative embodiments of the present disclosure are shown and described. As will be realized, the present disclosure is capable of other and different embodiments, and its several details are capable of modifications in various respects, all without departing from the disclosure. Accordingly, the drawings and description are to be regarded as illustrative in nature, and not as restrictive.

[0400] As used herein, the terms “about” and “approximately,” in reference to a number, is used herein to include numbers that fall within a range of 10%, 5%, or 1% in either direction (greater than or less than) the number unless otherwise stated or otherwise evident from the context (except where such number would exceed 100% of a possible value).

### EXAMPLES

[0401] The invention is further illustrated by the following non-limiting examples.

### Example 1

### Manufacture of Peptides

[0402] This example describes the manufacture of the peptides and peptide complexes described herein (e.g., any one of SEQ ID NO: 1-SEQ ID NO: 118, SEQ ID NO: 435, SEQ ID NO: 436, or SEQ ID NO: 554-SEQ ID NO: 567). Peptides derived from proteins were generated in mammalian cell culture using a published methodology. (A. D. Bandaranayke, C. Correnti, B. Y. Ryu, M. Brault, R. K. Strong, D. Rawlings. 2011. Daedalus: a robust, turnkey platform for rapid production of decigram quantities of active recombinant proteins in human cell lines using novel lentiviral vectors. Nucleic Acids Research. (39)21, e143).

[0403] The peptide sequence was reverse-translated into DNA, synthesized, and cloned in-frame with siderocalin using standard molecular biology techniques (M. R. Green, Joseph Sambrook. Molecular Cloning. 2012 Cold Spring Harbor Press). The resulting construct was packaged into a lentivirus, transduced into HEK-293 cells, expanded, isolated by immobilized metal affinity chromatography (IMAC), cleaved with tobacco etch virus (TEV) protease, and purified to homogeneity by reverse-phase chromatography. Following purification, each peptide was lyophilized and stored frozen.

### Example 2

### Construction of a Cystine Dense Peptide Screening Library

[0404] This example describes construction of a cystine dense peptide screening library using surface folding models and protease resistance data. Surface display may serve as a highly efficient method for screening peptides for target engagement, and mammalian surface display may be particularly useful for cystine dense peptides (CDPs) that utilize a secretory pathway that is capable of folding cysteine-rich surface proteins. A mammalian surface display system used to screen the improved cystine dense peptide library is illustrated in FIG. 1A. Under conditions where the CDP was not tagged but the cells were stained with an affinity-tagged (e.g., biotinylated) target protein and labeled with a fluorescent co-stain (e.g., streptavidin), cells expressing target-binding CDPs were sorted and grown over several rounds to enrich for sequences of interest (left, “Vector SDGF”). Under conditions where the CDP itself is tagged (e.g., 6×His (SEQ ID NO: 248)), the fluorescent co-stain (e.g., anti-6×His) was used to detect intact CDPs on the surface of the cell (right, “Vector SDPR”).

[0405] A CDP library was narrowed to a subset of CDP scaffolds (N=953) that scored especially highly in a quantitative surface folding assay. A composite surface folding score incorporating surface expression and protease resistance was used to assess the surface folding of the members of the large CDP library, as shown in FIG. 1B. The top scoring CDPs represented cystine scaffolds predicted to have high surface expression, protease resistance, or both. A database of 96,000 CDP sequences, gleaned from public sequence databases (Swiss-Prot and TrEMBL), was searched to identify peptides with structural or sequence homology to the identified 953 CDP scaffolds. An additional 7,940 CDPs were identified and combined with the 953 identified CDP scaffolds to create an optimized library containing 8,893 CDP members, as illustrated in FIG. 1C.

[0406] To determine whether homologs of top-performing CDPs improve library performance, the optimized library (optimized CDP library) and the original library (diversified CDP library) were cloned into a SDPR surface display lentivector with a C-terminal 6×His tag (SEQ ID NO: 248) and tested as a pool by low multiplicity of infection (MOI of 1) transduction, as shown in FIG. 1D. Cells were treated with 5 μg/mL trypsin, 20 μg/mL trypsin, or PBS (to trypsin) for 5 minutes, reduced with 10 mM DTT for 5 minutes, and stained with an anti-6×His antibody. In cells treated with PBS (no trypsin), anti-His staining was representative of total surface protein levels. In trypsin-treated cells, anti-His staining was representative of trypsin resistance since CDPs that have been cleaved by trypsin will release their His tag upon reduction with DTT and will not confer staining to their cell. The PBS-treated samples showed 2.14 times higher staining in the optimized library than in the diversified library, indicating better surface expression of the optimized pool. Trypsin treatment revealed similar improvements of the optimized library over the diversified library. Since only 11% of the optimized library represented top scoring diversified sequences, the higher staining of the optimized library, both without and with trypsin treatment, indicated that homology to a top scoring CDP was an effective means of identifying untested sequences that can be expected to demonstrate high surface expression and protease resistance similar to the top scoring CDPs.

### Example 3

### Structural Analysis of an Optimized Cystine Dense Peptide Library

[0407] This example describes computational modeling to perform structural analysis of an optimized cystine dense peptide (CDP) library. Structures of the optimized library members were modeled and compared to known crystal structures to facilitate both hypothesis-driven docking simulations and mutational structure-activity relationship (SAR). Protein structural modeling tools I-TASSER and Rosetta were used in combination to model the structures of CDP library members. I-TASSER has previously been used with high success rates in small scaffolds with complex folding. Rosetta protein modeling software was selected for one of their programs, “ForceDisulfides,” which can convert cysteine pairs with beta carbons in close proximity into disulfides in the model. As illustrated in FIG. 2A, the structural modeling pipeline used I-TASSER version 5.1 modeling software to create a structural model from a CDP sequence. The model was used to determine the likeliest disulfide pairings by minimizing the average pairwise distances between bonded cysteine sulfur atoms. Using the ForceDislufides program, Rosetta relaxed the disulfide-bonded structures with an all-atom refinement and repacking algorithm to minimize steric clashes.

[0408] The structural modeling pipeline was applied to CDPs that had been previously crystallized, and the models were compared to the experimentally obtained crystal structures. PyMol protein visualization software was used to align backbone atoms of the crystal structures and computational models. Alignments of the CDP structures are provided in FIG. 2B. The structures aligned with an average root-mean-square deviation (RMSD) of 0.924 Å, as shown in FIG. 2C. While this RMSD was greater than the 0.333 Å average RMSD when asymmetric units (AUs) of crystals were aligned to each other, an average RMSD of <1 Å compares well with the ˜1.5-2.2 Å RMSD values typically seen as evidence of successful modeling of de novo miniprotein designs. The pipeline was then applied to the remaining members of the optimized library. Of 8893 members modeled, 4298 structures passed the set confidence thresholds (I-TASSER C-score>0 and Rosetta energy score<80).

### Example 4

### Pre-Screening of Target-Compatible Scaffolds Using Low-Resolution Docking

[0409] This example describes using low-resolution docking of cystine dense peptide structural models for in silico pre-screening of target-compatible scaffolds. The CDP structural library, generated as described in EXAMPLE 3, was used to predict favorable binding to targets of clinical interest. Because high-resolution docking simulations are computationally expensive at large scale (thousands of binder candidates with no a priori interface knowledge), low-resolution RosettaDock scripts were used. Low-resolution simulations run faster than high-resolution simulations by converting side chains to a single large pseudo-atom, or centroid, that simplifies energetic calculations by eliminating rotamer packing. This conversion was utilized to predict favorable docking regions where high-scoring docks clustered (using DBSCAN) and to rank scaffolds for docking compatibility to targets of interest, allowing the generation of focused sub-libraries from the high diversity optimized library, identified in EXAMPLE 2. To generate the models, a target protein and CDP of interest are fed into RosettaDock in Low Resolution mode, performing at least 2000 runs. For each dock, the center of mass (CoM) of the CDP was identified and the docking interaction scored. The centers of mass from the top 100-200 docks were analyzed with DBSCAN to identify clusters of high-scoring docks, and the center of each cluster was defined as a possible peptide docking site.

[0410] To test in silico pre-screening of the optimized CDP library, the 4298-member optimized model library was docked against domains seen in a high-resolution co-crystal structures of PD-L1 with PD-1 (PDB ID No: 4ZQK). After docking all 4298 CDP scaffolds to the target, common target regions for CDP docking on the assembled candidate docking sites were identified using DBSCAN clustering. As shown in FIG. 3, four clusters were identified, one of which was located at the PD-L1:PD-1 interface and could represent a cluster of binders from which PD-L1 inhibitor candidates may be identified.

[0411] This whole-library docking was used to select sub-libraries enriched for scaffolds with favorable surface shape/energetics for target binding to PD-L1 at the PD-1 binding interface. A sub-library for high-scoring PD-L1 scaffolds predicted to dock at the PD-1 interface is shown in FIG. 4A and FIG. 4B. FIG. 4A shows Rosetta energy of docking for the high-scoring PD-L1 scaffolds plotted against the solvent accessible surface area (SASA). Scaffolds are color-coded based on the dominant structural element in the scaffold. The lighter shaded region represents scaffolds that were used for docking-enriched Met/Tyr scanning (DEMYS) library generation, described in greater detail in EXAMPLE 5. Even with <300 members, the scaffold library still possesses structural and taxonomical diversity, as seen in the phylogenetic tree shown in FIG. 4B.

### Example 5

### Identification of PD-L1-Binding Cystine Dense Peptides

[0412] This example describes identification of PD-L1-binding cystine dense peptides using docking-enriched methionine (M)-tyrosine (Y) scanning (DEMYS). The surface display assay and library generation techniques described in EXAMPLE 2-EXAMPLE 4 were implemented as a high throughput screening platform to identify PD-L1-binding CDPs. The limited sub-library of potential PD-L1-binding scaffolds permitted further diversification using tyrosine and methionine scanning to create hydrophobic patches that can seed novel protein:protein interactions. Tyrosine (Tyr) and methionine (Met) were chosen as they are aromatic and aliphatic residues, respectively, that contain a polar atom, avoiding the extreme hydrophobic character of similarly sized phenylalanine (Phe) and leucine (Leu) residues that could impact solubility. The docking-enriched M-Y scan (DEMYS) strategy for combining sub-library selection of docking-capable scaffolds with tyrosine and methionine scanning is illustrated in FIG. 5A. Scaffolds from the optimized model library that scored well in low-resolution target docking were selected and further diversified by Met/Tyr scanning of hydrophilic surface residues. A sample scaffold, color coded by hydrophobicity such that lighter shading indicates carbon atoms not contacting a polar atom, intermediate shading indicates acidic atoms, darker shading indicates basic atoms, and the remaining atoms are shown in white, is shown in its parental (WT) form and with three example Met or Tyr mutations (D18M, R26Y, and R36M). This sample scaffold was used to illustrate Met/Tyr scanning as a means of seeding or expanding hydrophobic patches for novel protein:protein interactions.

[0413] DEMYS was implemented to identify PD-L1-binding peptides that bound at the PD-1 binding interface. A DEMYS library targeted to the PD-L1:PD-1 interface was created. Both the optimized library, generated as described in EXAMPLE 4, and PD-L1:PD-1 DEMYS libraries were screened via SDGF mammalian display, as described in EXAMPLE 2, to identify PD-L1 binding CDPs. The optimized mammalian display screen, shown in FIG. 5B, yielded a validated binding scaffold, corresponding to SEQ ID NO: 4. Validation of SEQ ID NO: 4 binding to PD-L1 is shown in FIG. 5E. The DEMYS library mammalian display screen, shown in FIG. 5C, yielded hits representing four distinct parental CDP scaffolds, corresponding to SEQ ID NO: 3, SEQ ID NO: 57, SEQ ID NO: 58, and SEQ ID NO: 59, derived from SEQ ID NO: 353 (EEDCKVHCVKEWAAYKACAERIKSDTTGQAHCSGQYFDFWKCVDHCAAP, corresponding to SEQ ID NO: 354 (GSEEDCKVHCVKEWAAYKACAERIKSDTTGQAHCSGQYFDFWKCVDHCAAP) without an N-terminal GS), SEQ ID NO: 355 (EESCKPQCVKAWLEYQACAERVEKDESGEAHCTGQYFDYWHCVDKCAAK), SEQ ID NO: 356 (ARTCESQSHRFKGPCVSDTNCASVCRTERFSGGHCRGFRRRCLCTKHC), and SEQ ID NO: 357 (EERCKPQCVKSLYEYEKCVKRVENDDTGHKHCTGQYFDYWSCIDKCVAS), respectively. The highest staining of the four DEMYS hits, corresponding to SEQ ID NO: 3, was a variant of SEQ ID NO: 4, containing the same cystine scaffold. The remaining three hits, corresponding to SEQ ID NO: 57, SEQ ID NO: 58, and SEQ ID NO: 59, represented three distinct cystine scaffolds. Validation of SEQ ID NO: 2, SEQ ID NO: 57, SEQ ID NO: 58, and SEQ ID NO: 59 binding to PD-L1 are shown in FIG. 5F. Three of the four DEMYS hits were highly helical in nature and had high solvent-accessible surface area (SASA). While the optimized library as a whole contained high-SASA CDPs of a variety of structures (coil-rich, sheet-rich, or helix-rich), M-Y scanning focused on helix-rich structures based on docking enrichment results. The M-Y scan of the helix-rich CDPs from the second-generation library yielded multiple PD-L1-binding hits. The I-TASSER/Rosetta modeled scaffold for SEQ ID NO: 4, whose scaffold was identified as a PD-L1 binding hit in both screens, is shown in FIG. 5D.

[0414] As predicted by the library's derivation from top scoring scaffolds at the PD-L1:PD-1 interface, it was observed that high concentrations of PD-1-Fc can disrupt PD-L1 binding to cells surface-expressing SEQ ID NO: 4. Furthermore, the cluster of high-scoring docks predicted to disrupt PD-1 binding is found on a surface of PD-L1 with high homology to cynomolgus monkeys, but poor murine homology, as shown in FIG. 6A. In silico docking was used to predict binding of identified PD-L1-binding CDPs to PD-L1. The optimized library top 200 predicted PD-L1-binders (cyan mesh) docked at the PD-1 interface and are shown superimposed upon a surface rendition of PD-L1 (PDB ID No: 4ZQK), color-coded for cynomolgus monkey (left) and mouse (right) homology. PD-1 bound to PD-L1 is shown as a ribbon structure. The ability of SEQ ID NO: 4 to disrupt PD-1 interactions with PD-L1 was demonstrated using a competition assay, as shown in FIG. 6B. HEK 293F cells surface-expressing SEQ ID NO: 4 via SDGF demonstrated a reduction in staining when PD-1 competitor Fc fusion was added at either 50 nM, 150 nM, 500 nM, 1.5 μM, 5 μM, or 15 μM concentrations, but no difference in staining when control Fc fusion protein competitor is used at comparable concentrations. In flow staining assays, shown in FIG. 6C, cells surface-expressing SEQ ID NO: 4 bound both human and cynomolgus PD-L1, but no interactions with murine PD-L1 were observed. These results provided further validation of the modeled interface PD-L1-CDP binding interface. These results also demonstrate that SEQ ID NO: 4 binds at a site that is competitive with PD-1 and also demonstrate that SEQ ID NO: 4 binds to both human and cynomolgus PD-1.

[0415] Site-saturation mutagenesis (SSM) was used to develop a high-affinity variant of SEQ ID NO: 4. Cells displaying CDP variants of SEQ ID NO: 4 were stained with fluorescent PD-L1, and flow sorted based on binding to PD-L1, as shown in FIG. 7A. Sorted cells were regrown and pooled, as shown in FIG. 7B. Flow sorting of sorted cells stained with co-stain only (no PD-L1) is shown in FIG. 7C.

[0416] After two rounds of staining, flow sorting, and regrowth, the resulting variant pool was sequenced to identify enriched and depleted variants, as shown in FIG. 8. Enriched variants represented amino acid substitutions that likely improve target binding (either directly at the interface, or indirectly by improving folding and stability), while depletion indicated amino acid variants that disrupt binding capability. As shown in FIG. 8, “Beneficial in SEQ ID NO: 3” indicates those point mutations that were combined and included in SEQ ID NO: 3 to increase affinity of SEQ ID NO: 3 for PD-L1 relative to SEQ ID NO: 4. “Omitted in SEQ ID NO: 3” indicates a point mutation that appeared beneficial in isolation but, when combined with other beneficial point mutations, became disruptive to binding. This point mutation was omitted in SEQ ID NO: 3. “Disruptive reversions” indicate point mutations that, when reverted to the parent amino acid, reduced binding, indicating that those point mutations in SEQ ID NO: 4 were beneficial to PD-L1 binding. “Neutral reversions” indicate reversions to the parental amino acid present in SEQ ID NO: 353 that do not impact binding to PD-L1, showing that these mutations were acquired during library generation but were not instrumental to SEQ ID NO: 4 binding to PD-L1. Such neutral reversions are also referred to as passenger mutations.

[0417] Enrichment results shown in FIG. 8 are provided in tabular form in TABLE 12. Relative enrichment of each amino acid variant (in columns) is shown relative to the amino acid at the corresponding position in SEQ ID NO: 4 (in rows). Positive values represented amino acid substitutions that likely improve target binding, while negative values indicated amino acid variants that disrupt binding capability.

TABLE 12
Relative Enrichment of Amino Acid Variants Binding to PD-L1

| SEQ ID | | Amino acid Variant | | | | | | | | | | | | | | | | | | |
|---|---|---|---|---|---|---|---|---|---|---|---|---|---|---|---|---|---|---|---|---|
| NO: 4 | | G | D | E | H | K | R | N | Q | S | T | A | M | I | L | V | F | W | Y | P |
| 01 | E | −3.49 | −3.54 | −3.02 | | −0.96 | −1.64 | −3.87 | −4.09 | −2.99 | −2.41 | −3.97 | 3.90 | −4.59 | −2.29 | 2.34 | −2.51 | 2.06 | −2.43 | −3.44 |
| 02 | E | 2.83 | −0.54 | −1.39 | | −3.12 | −1.09 | −4.81 | −3.54 | −4.50 | −0.73 | −3.00 | −3.37 | −3.95 | 1.39 | −3.72 | 0.67 | −3.73 | −4.03 | −1.75 |
| 03 | D | −1.18 | −4.54 | | 0.84 | −3.02 | −4.65 | −3.81 | −0.44 | −4.65 | 1.38 | −4.43 | −4.48 | −2.37 | −4.78 | −4.21 | −3.25 | −5.00 | −1.91 | −3.91 |
| 04 | C | | | | | | | | | | | | | | | | | | | |
| 05 | K | −0.51 | −5.36 | −4.12 | −4.90 | −4.48 | | 0.67 | −2.96 | −3.41 | −4.24 | −4.32 | −0.97 | −5.39 | −4.16 | 2.54 | −4.27 | −3.00 | −4.24 | −4.72 |
| 06 | V | −0.11 | −5.07 | −5.17 | 2.95 | −3.56 | −3.55 | −4.11 | −2.95 | 1.18 | 0.36 | −5.79 | 1.71 | −2.71 | 0.16 | | −3.31 | −4.05 | −3.04 | −6.12 |
| 07 | H | −4.80 | −0.19 | 2.53 | 1.31 | | 1.79 | 3.32 | 2.29 | 3.11 | 1.74 | −3.87 | −4.41 | −3.14 | −1.13 | −4.69 | −3.56 | −1.48 | 0.76 | −2.63 |
| 08 | C | | | | | | | | | | | | | | | | | | | |
| 09 | V | −4.50 | −4.79 | 1.38 | −3.00 | −4.00 | −6.05 | −5.90 | −3.08 | −4.74 | −5.91 | −5.72 | 0.91 | −4.82 | −3.41 | | −4.59 | −4.65 | −5.14 | −5.54 |
| 10 | K | −0.48 | 2.30 | −5.21 | −1.50 | −2.60 | | 2.29 | −4.35 | 1.35 | 2.67 | 3.39 | −1.71 | −3.24 | −3.83 | −4.53 | −5.87 | −5.16 | −3.83 | −2.89 |
| 11 | E | −2.36 | 3.33 | 2.78 | | 4.85 | −1.77 | −2.14 | −0.82 | 1.51 | 3.05 | 5.09 | 3.93 | 3.89 | 1.55 | 5.74 | −0.78 | 8.78 | −2.55 | −2.94 |
| 12 | W | −1.69 | 0.20 | −2.38 | 0.94 | −0.65 | −1.55 | −0.09 | −2.56 | 3.71 | 0.56 | −0.09 | −2.29 | −1.76 | −5.60 | −1.95 | −1.86 | | −5.60 | 2.49 |
| 13 | A | −0.68 | | −0.96 | 0.06 | −1.29 | 2.57 | −0.08 | 4.49 | 3.53 | −0.58 | 1.71 | 10.78 | 10.00 | 11.08 | 10.51 | −0.65 | 2.61 | −1.67 | −1.77 |
| 14 | A | 1.58 | | −2.11 | 2.21 | −0.17 | 0.38 | −1.65 | 3.07 | −0.78 | −4.52 | 0.46 | −3.92 | −4.77 | −3.90 | −4.95 | −2.96 | −4.41 | 2.30 | −0.91 |
| 15 | Y | 12.23 | 9.87 | 0.81 | 4.66 | 8.32 | 10.21 | 8.82 | 10.33 | 10.90 | 9.18 | 6.92 | 2.29 | 2.95 | 3.31 | 2.68 | −0.43 | 0.20 | | −0.08 |
| 16 | K | −4.47 | −4.90 | 3.16 | −1.46 | −3.14 | | 2.26 | 0.91 | −4.05 | −4.37 | −4.75 | −1.29 | −4.42 | 0.47 | 1.89 | −4.68 | −3.31 | −0.94 | −4.21 |
| 17 | A | 3.38 | | 2.88 | −0.77 | −1.95 | −4.05 | −4.32 | −3.91 | −5.16 | −1.47 | 2.96 | −3.43 | −4.92 | 0.76 | −5.84 | −3.50 | 1.07 | −0.88 | 1.70 |
| 18 | C | | | | | | | | | | | | | | | | | | | |
| 19 | A | 1.67 | | −1.41 | 0.59 | 1.77 | 1.78 | −0.84 | 5.69 | −3.37 | 1.19 | −0.36 | −3.76 | −5.07 | −5.31 | −5.86 | 0.01 | −3.65 | −5.74 | 4.27 |
| 20 | E | 2.11 | 0.63 | 3.09 | | −5.81 | −1.50 | −5.48 | 1.10 | −4.78 | −4.07 | −4.36 | −4.93 | −5.98 | −5.60 | −1.15 | −5.60 | −5.56 | −5.00 | 3.67 |
| 21 | R | 3.23 | −4.53 | 1.12 | −0.81 | 2.68 | 0.08 | | 2.19 | 3.41 | 2.68 | 4.85 | −0.41 | −3.27 | −4.58 | 2.12 | −4.55 | −2.65 | 6.09 | −0.23 |
| 22 | I | 6.28 | −1.27 | 9.88 | 7.55 | 0.32 | 3.59 | −3.27 | 10.64 | −2.32 | 1.60 | 1.98 | 0.12 | | −2.18 | −1.95 | 1.98 | −0.04 | 1.66 | 8.45 |
| 23 | K | 2.47 | −0.05 | 4.02 | 1.11 | 2.54 | | 1.06 | 1.78 | 0.10 | 0.38 | −3.45 | −3.60 | −5.72 | −2.33 | −4.53 | −5.41 | −3.88 | 0.54 | 2.95 |
| 24 | S | 5.33 | 1.05 | 1.86 | −3.17 | 2.30 | −0.54 | −2.97 | 2.75 | 1.48 | | −3.06 | −5.01 | −1.25 | −3.48 | 0.11 | 2.39 | −3.74 | −3.16 | 3.28 |
| 25 | Y | −3.50 | 3.43 | 4.40 | −4.18 | 0.64 | −3.20 | −4.07 | 2.78 | 5.16 | 1.13 | 2.46 | 2.70 | 2.30 | −1.55 | 2.90 | −1.23 | −4.86 | | 0.96 |
| 26 | T | 0.86 | 1.72 | 5.54 | −4.16 | −3.06 | 0.99 | 4.12 | −2.48 | −0.24 | −4.85 | | −4.52 | −0.32 | −5.19 | −5.05 | −3.37 | 2.17 | 3.49 | −3.71 |
| 27 | I | 0.68 | 0.11 | −2.95 | 3.85 | −4.70 | −4.81 | −4.72 | 1.49 | 1.73 | −1.99 | 2.87 | −2.68 | | −5.11 | 2.80 | −2.02 | −4.66 | −4.55 | 0.37 |
| 28 | G | | −3.36 | 0.45 | −0.20 | −0.64 | −2.77 | −5.14 | 0.98 | 0.64 | −0.72 | 4.94 | −4.69 | −5.03 | 1.80 | 0.41 | 1.39 | −5.62 | −4.64 | 2.88 |
| 29 | R | 2.29 | 2.31 | −1.47 | 1.45 | −2.71 | 0.17 | | 1.70 | 4.61 | 3.73 | 1.35 | −1.90 | 3.15 | −2.77 | −2.85 | −5.15 | −0.34 | 3.09 | 2.56 |
| 30 | A | −4.55 | | 2.90 | −3.24 | −5.02 | −5.12 | −4.62 | 2.56 | −4.58 | −2.64 | −1.97 | −1.40 | 2.60 | −0.62 | −4.80 | −3.74 | −3.97 | −0.42 | −2.65 |
| 31 | H | 4.13 | −4.73 | 2.85 | 5.02 | | −2.48 | −1.77 | 2.43 | −2.80 | −1.57 | −2.56 | −0.89 | −2.34 | −5.42 | −5.04 | 1.89 | 3.50 | −0.59 | −4.93 |
| 32 | C | | | | | | | | | | | | | | | | | | | |
| 33 | S | 1.08 | 1.42 | −4.00 | 3.23 | −0.62 | −5.43 | −1.02 | 1.69 | −0.29 | | −0.56 | −5.30 | −2.00 | −3.12 | −1.46 | −5.88 | −0.68 | 1.30 | 2.68 |
| 34 | G | | −4.71 | −2.05 | −5.02 | −2.55 | −4.85 | −4.82 | −4.10 | −1.19 | −2.19 | −4.08 | 2.40 | −4.43 | 4.21 | −1.94 | −3.83 | −5.67 | −5.03 | −4.07 |
| 35 | Q | 0.87 | 2.42 | 0.24 | −0.46 | −3.46 | 0.64 | −0.65 | 2.57 | | −4.24 | −0.31 | −4.60 | −4.95 | −1.15 | −2.28 | −3.49 | 1.79 | −4.31 | −1.43 |
| 36 | Y | −0.19 | −1.76 | −0.07 | 3.54 | 3.67 | 8.65 | −1.25 | 3.02 | 2.30 | 3.66 | 4.09 | −0.70 | −2.02 | 4.76 | 0.51 | 1.65 | −5.01 | | 7.33 |
| 37 | F | 4.37 | −2.34 | −4.93 | 2.28 | −5.29 | −3.85 | −1.85 | −4.56 | 2.46 | −3.69 | −5.09 | −4.15 | −2.82 | −4.72 | −4.17 | | −3.83 | −4.08 | −5.11 |
| 38 | D | −2.16 | −2.63 | | −4.64 | −5.89 | 5.47 | −5.02 | −0.66 | −4.72 | −4.37 | −4.36 | −4.16 | −4.64 | −4.44 | −4.78 | −4.34 | −1.46 | −1.48 | −4.37 |
| 39 | V | 0.01 | −5.12 | −4.63 | −5.06 | −3.31 | −3.35 | −3.62 | −0.87 | −3.26 | −3.80 | −4.44 | −0.42 | −3.60 | −2.69 | | −4.85 | −4.18 | −3.50 | 3.07 |
| 40 | W | 2.35 | −0.23 | −3.57 | −4.59 | 3.94 | −4.22 | 0.81 | −2.04 | −3.53 | −3.12 | −2.26 | −2.48 | −1.43 | −1.28 | 2.59 | 12.61 | | −3.02 | 0.21 |
| 41 | K | −0.11 | 2.08 | 5.01 | −0.51 | −4.70 | | −2.05 | −0.69 | −0.36 | −3.57 | −2.53 | −1.29 | −4.11 | −0.61 | −4.12 | −4.33 | −5.70 | −3.98 | −4.98 |
| 42 | C | | | | | | | | | | | | | | | | | | | |
| 43 | L | −2.13 | −5.49 | −4.25 | 1.01 | −0.07 | −3.59 | −3.00 | −5.51 | 4.69 | −4.83 | −3.23 | −1.55 | −4.79 | | −4.41 | 0.95 | −1.03 | −4.45 | −3.20 |
| 44 | D | −1.47 | −5.27 | | 1.49 | −0.41 | −3.08 | 1.75 | −2.62 | −4.77 | 2.54 | 0.67 | 1.59 | −0.75 | 1.52 | −5.47 | 0.64 | −5.17 | −4.57 | −0.44 |
| 45 | H | 3.33 | 1.89 | 4.43 | 4.07 | | 0.26 | 0.29 | −2.81 | −1.52 | −1.42 | −3.84 | 0.73 | −0.72 | 1.67 | −5.60 | −4.12 | −4.20 | −2.27 | 2.86 |
| 46 | C | | | | | | | | | | | | | | | | | | | |
| 47 | A | 1.63 | | −0.18 | −2.26 | −2.30 | 1.70 | −3.87 | −4.32 | −2.89 | 1.66 | −0.79 | −5.25 | 1.74 | 1.70 | −3.03 | −3.81 | −5.62 | −3.71 | −5.22 |
| 48 | A | 2.29 | | 0.56 | 0.25 | −1.20 | −0.32 | 1.99 | −3.81 | 0.85 | −3.63 | 1.83 | −2.02 | −5.01 | −4.41 | −0.85 | 0.76 | −0.36 | −4.22 | −4.32 |
| 49 | P | −4.02 | 1.61 | −3.12 | −3.88 | 1.84 | −3.92 | −3.36 | 1.50 | 6.30 | 2.18 | −0.52 | −4.04 | −1.41 | −4.81 | −3.91 | 2.21 | −0.43 | −4.62 | |

[0418] The heatmap shown in FIG. 8 was recolored in FIG. 21 to identify each amino acid that facilitated PD-L1 binding. As seen in FIG. 21, amino acid substitutions relative to SEQ ID NO: 4 determined to have a neutral or beneficial effect are colored in red, and residues of the original SEQ ID NO: 4 sequence are colored black. Amino acids shaded in either dark gray or black are considered to facilitate binding to PD-L1. For example, V6 of SEQ ID NO: 4 has five amino acid substitutions, E, Q, S, M, or L, that were either neutral or beneficial to PD-L1 binding. Therefore, any of E, Q, S, M, L, or V at site six of the CDP facilitate binding to PD-L1. The consensus sequences SEQ ID NO: 358-SEQ ID NO: 363 were identified based on this enrichment data.

[0419] Six highly enriched amino acid substitutions (E11W, A13M, Y15G, 122N, Y36K, and W40F) were combined (SEQ ID NO: 8) and evaluated against both SEQ ID NO: 4 and each single reversion variant (SEQ ID NO: 9-SEQ ID NO: 14, corresponding to reversion mutants WI IE, M13A, G15Y, N22I, K36Y, and F40W, respectively), as shown in FIG. 9, to see if all mutations were synergistic. Increased PD-L1 staining was indicative of higher affinity for PD-L1. The highest-staining variant contained all except the E11W mutation, so SEQ ID NO: 3, corresponding to SEQ ID NO: 4 with amino acid substitutions A13M, Y15G, 122N, Y36K, and W40F, was selected as the affinity matured variant. SSM was also used to evaluate the mutations found in SEQ ID NO: 4, relative to the parent scaffold (SEQ ID NO: 353). SEQ ID NO: 4 differed from the SEQ ID NO: 353 by five amino acid substitutions (D25Y, T27I, Q29R, F39V, and V43L). The SSM enrichment/depletion data showed that two of these substitutions (F39V and V43L) were beneficial to PD-L1 binding, as the respective reversion mutations were depleted. The other three reversions (D25Y, T27I, and Q29R) were not depleted, showing that the Q29R, F39V, and V43L substitutions found in SEQ ID NO: 4 are likely to be benign passenger mutations.

### Example 6

### Stability and Binding Affinity of a High-Affinity PD-L1-Binding Cystine Dense Peptide

[0420] This example describes characterization of the stability, purity, folding, and binding affinity of a high-affinity PD-L1-binding cystine dense peptide. CDPs were produced as soluble molecules as described in EXAMPLE 1. Three recombinant CDPs were evaluated for PD-L1 binding: SEQ ID NO: 4, SEQ ID NO: 3, and SEQ ID NO: 1 which contained a single N22Q amino acid substitution relative to SEQ ID NO: 3. The N22Q substitution present in SEQ ID NO: 1 removes a canonical N-linked glycosite acquired during affinity maturation. All three CDPs were produced at high yields and high homogeneity, as evaluated by reversed phase high-performance liquid chromatography (RP-HPLC, top) and SDS-PAGE (bottom) in FIG. 10A. While SEQ ID NO: 3 contained a canonical N-linked glycosite, there was minimal evidence of glycosylation, which might be seen as a minor peak indicated by an arrow in the top middle panel. Smearing consistent with extensive glycosylation is not visible in the SDS-PAGE gel (bottom). Exposure of the CDPs to high concentrations of reducing agent (10 mM DTT, measured by RP-HPLC in FIG. 10A) showed that the non-matured hit, SEQ ID NO: 4, demonstrated a substantial mobility shift in RP-HPLC consistent with losing cystine-stabilized tertiary structure. The affinity matured variants SEQ ID NO: 3 and SEQ ID NO: 1, however, demonstrated only a subtle mobility shift in RP-HPLC. Confirmation from the MS data (FIG. 10B) that the DTT-treated samples were ˜6 Da heavier than the PBS-treated samples, indicated that both SEQ ID NO: 3 and SEQ ID NO: 1 variants were indeed reduced by DTT but retained the majority of their tertiary structure. This shows that some or all of the mutations acquired during affinity maturation contribute to cystine-independent tertiary structure stabilization. The mobility shift observed upon boiling in LDS sample buffer with 10 mM DTT (bottom, FIG. 10A) shows CDP folding that is mediated by disulfides. Full gels are provided in FIG. 18. The mass spectrometry data, shown in FIG. 10B, in which the m/z values for all three CDPs are consistent with oxidized cysteines, further confirms CDP folding.

[0421] Binding to PD-L1 of the three recombinant CDPs was evaluated by surface plasmon resonance (SPR), as shown in FIG. 10C. The SPR analysis demonstrated improved affinity upon maturation, as seen by the higher affinity of SEQ ID NO: 3 and SEQ ID NO: 1 as compared to SEQ ID NO: 4. Specifically, SEQ ID NO: 4 bound PD-L1 with an equilibrium dissociation constant (K_{D}) of 39.6±0.3 nM, whereas SEQ ID NO: 3 and SEQ ID NO: 1 bound PD-L1 with K_{D}=160±1 pM and 202±2 pM, respectively, demonstrating an approximately 200-fold improvement in K_{D} upon affinity maturation of SEQ ID NO: 4. Further SPR analysis was performed to measure competition of SEQ ID NO: 1 with the PD-L1-binding domain of PD-1, shown in bold and underline in the full-length sequence of PD-1

(MQIPQAPWPVVWAVLQLGWRPGWFLDSPDRPWNPPTFSPALLVVT
EGDNATFTCSFSNTSESFVLNWYRMSPSNQTDKLAAFPEDRSQPGQ
DCRFRVTQLPNGRDFHMSVVRARRNDSGTYLCGAISLAPKAQIKES
LRAELRVTERRAEVPTAHPSPSPRPAGQFQTLVVGVVGGLLGSLVL
LVWVLAVICSRAARGTIGARRTGQPLKEDPSAVPVFSVDYGELDFQ
WREKTPEPPVPCVPEQTEYATIVFPSGMGTSSPARRGSADGPRSAQ
PLRPEDGHCSWPL, SEQ ID NO: 349)

or PD-L1, as shown in FIG. 10D. This data confirmed that SEQ ID NO: 1 competes with PD-1 and that competition was not an artifact of cell surface staining.

[0422] The N22Q variant CDP (SEQ ID NO: 1) was co-crystalized with PD-L1 to confirm the CDP binding site and visualize the surface interactions with PD-L1, as shown in FIG. 20A. SEQ ID NO: 1, a variant that eliminated a canonical N-linked glycosite acquired during affinity maturation, was produced as a soluble molecule as described in EXAMPLE 1 and was co-crystalized with PD-L1. A portion of the CDP, from A19 through Q35, was unresolved in the 2.0 Å structure. Enrichment analysis was performed to determine the impact of amino acid substitutions at residues that were resolved in the crystal structure relative to residues that were unresolved in the crystal structure. The average SSM enrichment scores of unresolved residues were less extreme (deviated less from 0) than seen with resolved residues, as shown in FIG. 20B, showing the specific side chain identities of unresolved residues were less important to high affinity binding. The portion that did resolve matched the model from E1 through C18 and from D38 through A48. K36 and F37 resolved but were not part of the D38-A48 helix.

[0423] The resolved portion had an interface surface area of 620 Å² as assessed by PISA (PDBe PISA v1.52), which was similar to the observed interface surface area of PD-L1 with PD-1 (622 Å², PDB 4ZQK). The CDP's location on PD-L1 fell squarely within both the PD-1 occupancy space, as shown in FIG. 20C, showing the in silico low-resolution docking enrichment was predictive of the interface of this hit. A closer look at the interface, shown in FIG. 20D and in FIG. 20G, revealed that the CDP makes use of many of the same interaction sites as PD-1. Both K5 of SEQ ID NO: 1 and K78 of PD-1 made a salt bridge with the A121 backbone oxygen of PD-L1, while both D44 of SEQ ID NO: 1 and E136 of PD-1 similarly formed a salt bridge with Y123 of PD-L1. F40 of SEQ ID NO: 1 sat in pocket formed by Y56, R113, M115, and Y123 of PD-L1, making hydrophobic contacts (M115), herringbone ring stacking interactions (two Y's), and a cation-pi interaction (R113). This pocket was also occupied by I134 of PD-1. Furthermore, V9, W12, and L43 of SEQ ID NO: 1 also shared sites of hydrophobic interactions used by L128, A132, and I126 of PD-1, respectively. The interface-adjacent mutations that differentiated SEQ ID NO: 1 from its parental scaffold would be expected to disrupt binding when reverted to the parental side chains, as illustrated in FIG. 20E. The hydrophobic interactions of both M13 and L43 with the surface of PD-L1 would be lost in the parental A13 and V43; the pocket occupied by F40 would have to distort to accommodate the parental W40, altering the interface elsewhere; and parental F39 does not neatly fit against the surface as V39 does. Finally, analysis of the human/mouse and human/cynomolgus monkey (cyno) homology on the PD-L1 surface revealed that the interaction site contained several non-homologous side chains between human and mice, as shown in FIG. 20F. The human/cyno homology is perfect at this interface, which matches the cross-reactivity data. SEQ ID NO: 4 is not cross-reactive with murine PD-L1 but does bind cyno PD-L1.

### Example 7

### Incorporation of a PD-L1-Binding Peptide into a Bispecific Immune Cell Engager

[0424] This example describes incorporation of a high-affinity PD-L1-binding cystine dense peptide into a bispecific immune cell engager (BiICE) to produce a highly effective anti-tumor agent. A PD-L1-binding CDP that disrupts the PD-L1:PD-1 interface could serve as an immuno-oncology drug, inhibiting a checkpoint signal commonly communicated by tumor cells to infiltrating T cells. Using such a PD-L1-binding CDP in a bispecific immune cell engager (BiICE) format, designed to engage both CD3 on T cells and PD-L1 on cancer cells, could further transform PD-L1 from a signal on tumor cells that protects them from immune attack into a signal on tumor cells that encourages attack from the immune system by encouraging activated T cells to engage and kill PD-L1-overexpressing cells. To test this, SEQ ID NO: 2, corresponding to SEQ ID NO: 4 with an N22D substitution, was cloned into a heterodimeric Fc fusion construct containing a set of mutations facilitating knob-and-hole heterodimerization. This PD-L1-binding CDP Fc fusion construct was paired, using knob-and-hole heterodimerization, with an Fc fusion to a CD3-engaging scFv to form a PD-L1-binding CDP/scFv bispecific immune cell engager (CS-BiICE). The CDP-based BiICE (“CS-BiICE”) was formed from a first fusion protein (METDTLLLWVLLLWVPGSTGDYKDEGGSEEDCKVHCVKEWMAGKACAERDKSYTIG RAHCSGQKFDVFKCLDHCAAPGGGGSGGGGSGGGGSEPKSSDKTHTCPPCPAPELLGG PSVFLFPPKPKDTLMISRTPEVTCVVVDVSSHEDPEVKFNWYVDGVEVHNAKTKPREEQ YASTYRVVSVLTVLHQDWLNGKEYKCKVSNKALGAPIEKTISKAKGQPREPQVYTLPP SRDELTKNQVSLSCAVKGFYPSDIAVEWESNGQPENNYKTTPPVLDSDGSFFLVSKLTV DKSRWQQGNVFSCSVMHEALHNHYTQKSLSLSPGK; SEQ ID NO: 342) containing a PD-L1-binding CDP (SEQ ID NO: 2) with an N-terminal signal peptide (METDTLLLWVLLLWVPGSTG; SEQ ID NO: 247; “SP”) and FLAG tag (DYKDEGGS; SEQ ID NO: 246) fused to an Fc “hole” sequence via a linker and a second fusion protein (METDTLLLWVLLLWVPGSTGEVQLVESGGGLVQPGGSLKL SCAASGFTFNKYAMNW VRQAPGKGLEWVARIRSKYNNYATYYADSVKDRFTISRDDSKNTAYLQMNNLKTEDT AVYYCVRHGNFGNSYISYWAYWGQGTLVTVSSGGGGSGGGGSGGGGSQTVVTQEPSL TVSPGGTVTLTCGSSTGAVTSGNYPNWVQQKPGQAPRGLIGGTKFLAPGTPARFSGSLL GGKAALTLSGVQPEDEAEYYCVLWYSNRWVFGGGTKLTVLGGGGSEPKSSDKTHTCP PCPAPELLGGPSVFLFPPKPKDTLMISRTPEVTCVVVDVSHEDPEVKFNWYVDGVEVHN AKTKPREEQYASTYRVVSVLTVLHQDWLNGKEYKCKVSNKALGAPIEKTISKAKGQPR EPQVYTLPPSRDELTKNQVSLWCLVKGFYPSDIAVEWESNGQPENNYKTTPPVLDSDGS FFLYSKLTVDKSRWQQGNVFSCSVMHEALHNHYTQKSLSLSPGKGGGGSHHHHHH; SEQ ID NO: 347) containing an anti-CD3 single-chain fragment variable (scFv) fused to an Fc “knob” sequence with an N-terminal signal peptide and C-terminal 6×His tag (HHHHHH; SEQ ID NO: 248). The “hole” sequence heterodimerizes with the “knob” sequence.

[0425] A comparator molecule was also constructed. The comparator molecule, referred to as SS-BiICE, contained an anti-PD-L1 scFv in place of the PD-L1-binding CDP but was otherwise the same as the CS-BiICE molecule. The scFv-based BiICE (“SS-BiICE”) was formed from a first fusion protein (METDTLLLWVLLLWVPGSTGDYKDEGGSDIVLTQSPATLSLSPGERATLSCRATESVE YYGTSLVQWYQQKPGQPPKLLIYAASSVDSGVPSRFSGSGSGTDFTLTINSLEAEDAAT YFCQQSRRVPYTFGQGTKLEIKGGGGSGGGGSGGGGSEVQLVQSGAEVKKPGASVKM SCKASGYTFTSYVMHWVKQAPGQRLEWIGYVNPFNDGTKYNEMFKGRATLTSDKSTS TAYMELSSLRSEDTAVYYCARQAWGYPWGQGTLVTVSSGGGGSEPKSSDKTHTCPPCP APELLGGPSVFLFPPKPKDTLMISRTPEVTCVVVDVSSHEDPEVKFNWYVDGVEVHNAK TKPREEQYASTYRVVSVLTVLHQDWLNGKEYKCKVSNKALGAPIEKTISKAKGQPREP QVYTLPPSRDELTKNQVSLSCAVKGFYPSDIAVEWESNGQPENNYKTTPPVLDSDGSFF LVSKLTVDKSRWQQGNVFSCSVMHEALHNHYTQKSLSLSPGK; SEQ ID NO: 346) containing an anti-PD-L1 scFc comprising SEQ ID NO: 343 (EVQLVQSGAEVKKPGASVKMSCKASGYTFTSYVMHWVKQAPGQRLEWIGYVNPFND GTKYNEMFKGRATLTSDKSTSTAYMELSSLRSEDTAVYYCARQAWGYPWGQGTLVTV SS) and SEQ ID NO: 344 (DIVLTQSPATLSLSPGERATLSCRATESVEYYGTSLVQWYQQKPGQPPKLLIYAASSVD SGVPSRFSGSGSGTDFTLTINSLEAEDAATYFCQQSRRVPYTFGQGTKLEIK) with an N-terminal signal peptide and FLAG tag fused to an Fc “hole” sequence and a second fusion protein (SEQ ID NO: 347) containing an anti-CD3 single-chain fragment variable (scFv) fused to an Fc “knob” sequence with an N-terminal signal peptide and C-terminal 6×His tag (SEQ ID NO: 248). Schematics of the CDP-containing CS-BiICE and the comparator SS-BiICE are illustrated in FIG. 11.

[0426] Like SEQ ID NO: 4, SEQ ID NO: 3, which contains a single D22N amino acid substitution relative to SEQ ID NO: 2, and the anti-PD-L1 scFv also lacked murine cross-reactivity, as shown in FIG. 12. Cross-reactivity of SEQ ID NO: 3, anti-PD-L1 scFv (DIVLTQSPATLSLSPGERATLSCRATESVEYYGTSLVQWYQQKPGQPPKLLIYAASSVD SGVPSRFSGSGSGTDFTLTINSLEAEDAATYFCQQSRRVPYTFGQGTKLEIKGGGGSGGG GSGGGGSEVQLVQSGAEVKKPGASVKMSCKASGYTFTSYVMHWVKQAPGQRLEWIG YVNPFNDGTKYNEMFKGRATLTSDKSTSTAYMELSSLRSEDTAVYYCARQAWGYPWG QGTLVTVSS; SEQ ID NO: 345), and an scFv derived from atezolizumab (EVQLVESGGGLVQPGGSLRLSCAASGFTFSDSWIHWVRQAPGKGLEWVAWISPYGGS TYYADSVKGRFTISADTSKNTAYLQMNSLRAEDTAVYYCARRHWPGGFDYWGQGTL VTVSSGGGGSGGGGSGGGGSDIQMTQSPSSLSASVGDRVTITCRASQDVSTAVAWYQQ KPGKAPKLLIYSASFLYSGVPSRFSGSGSGTDFTLTISSLQPEDFATYYCQQYLYHPATFG QGTKVEIK; SEQ ID NO: 348) to human, cynomolgus monkey (“Cyno”), or mouse PD-L1 was determined by measuring staining of cells expressing the PD-L1 binding moieties with fluorescently labeled PD-L1 orthologs. SEQ ID NO: 3 demonstrated binding to both human and cynomolgus PD-L1 but not to murine PD-L1. The anti-PD-L1 scFv (SEQ ID NO: 345) demonstrated binding to only human PD-L1. The scFv derived from atezolizumab (SEQ ID NO: 348) demonstrated binding to all three PD-L1 orthologs, where the highest binding is to human and the lowest binding is to mouse. Both scFv domains were of the VHVL orientation with a [GGGGS]₃ (SEQ ID NO: 165) linker joining VH and VL domains. The observed cross-reactivity of the scFv derived from atezolizumab to murine PD-L1 makes it a poor in vivo comparator in murine studies to SEQ ID NO: 3 and related variants as a BiICE component due to the possibility of on-target, off-tumor T-cell engagement. Unlike the scFv derived from atezolizumab, the anti-PD-L1 scFv did not show cross-reactivity to murine PD-L1. For this reason, the anti-PD-L1 scFv was selected as the comparator to SEQ ID NO: 3 and related variants to eliminate on-target off-tumor toxicity as a variable.

[0427] CS-BiICE and SS-BiICE molecules were produced as recombinant proteins as described in EXAMPLE 1 and purified by immobilized metal affinity chromatography (IMAC). SDS-PAGE gels of the purified CS-BiICE and SS-BiICE molecules are shown in FIG. 13A and FIG. 13C, respectively. Heterodimeric (H) species, representing a complex of anti-CD3-Fc knob (SEQ ID NO: 347) and PD-L1-binding-Fc hole (SEQ ID NO: 342 in CS-BiICE and SEQ ID NO: 346 in SS-BiICE), and anti-CD3-scFv-Fc monomer (M) were seen under non-reducing (NR) conditions for both CS-BiICE and SS-BiICE. The anti-CD3 monomer band was consistent with the band observed when anti-CD3-Fc knob was expressed alone. The presence of the monomeric band was due to the higher transduction efficiency for SEQ ID NO: 347 than SEQ ID NO: 346 or SEQ ID NO: 342. The heterodimer band was consistent with the molecular weight for the CS-BiICE and SS-BiICE heterodimers under non-reducing conditions in which disulfides join the two Fc halves. In the reduced lanes (“DTT”) of FIG. 13A and FIG. 13C, “S” band ran consistent with molecular weight of an scFv-Fc fusion, while the “C” band ran consistent with molecular weight of a CDP-Fc fusion and was only observed in the CS-BiICE sample. The presence of anti-CD3-scFv-Fc monomer did not affect T cell killing performance. Under reducing conditions (DTT), separate CDP-Fc and scFv-Fc species were seen for CS-BiICE due to their different sizes, while the scFv-Fc species appeared as a single band for SS-BiICE due to the similar molecular sizes of the two species. Binding affinity of CS-BiICE and SS-BiICE in vitro to PD-L1 was measured using SPR, as shown in FIG. 13B and FIG. 13D, respectively. Both CS-BiICE and SS-BiICE demonstrated binding in vitro to PD-L1. SPR of the CS-BiICE (FIG. 13B) demonstrated a reduction in overall PD-L1 affinity upon incorporation into a BiICE scaffold relative to the PD-L1-binding CDP alone (K_{D}=11.2 nM for CS-BiICE versus 202 pM for SEQ ID NO: 1). This reduction in affinity was likely due to a reduced association constant, as the dissociation rate of CS-BiICE was actually slower than that of the PD-L1-binding CDP alone (k_{d}=6.06×10⁻³ s⁻¹ for CS-BiICE versus 1.96×10⁻² s⁻¹ for SEQ ID NO: 1), while the association constant of the CS-BiICE was much lower (kₐ=4.07×10⁵ M⁻¹s⁻¹ for CS-BiICE versus 9.73×10⁷ M⁻¹s⁻¹ for SEQ ID NO: 1). In the context of an immunological synapse, there is expected to be high local receptor concentration, so a reduced on-rate may not be detrimental to performance. SPR of the SS-BiICE (FIG. 13D) demonstrated that the PD-L1-engaging scFv of the SS-BiICE promoted binding to PD-L1 at K_{D}=65 nM. Both the on-rate (kₐ=1.71×10⁵ M⁻¹s⁻¹) and the off-rate (k_{d}=1.10×10⁻² s⁻¹) of SS-BiICE were slightly worse than that of CS-BiICE. This demonstrates that SEQ ID NO: 2, which contains a single Q22D substitution relative to SEQ ID NO: 1, can be assembled with a CD3-binding moiety in an Fc fusion format, and that the assembled molecule binds PD-L1 and with a higher affinity than a comparator molecule using a PD-L1-binding scFv.

### Example 8

### Induction of T-Cell Killing Using a PD-L1-Binding Bispecific Immune Cell Engager

[0428] This example describes induction of T-cell killing using a bispecific immune cell engager (BiICE) molecule containing a PD-L1-binding CDP. The BiICE molecules, prepared and validated as described in EXAMPLE 7, demonstrated binding to primary T cells purified from human patient derived peripheral blood mononuclear cells (PBMCs, FIG. 14A). In vitro T-cell killing (TCK) assays using cancer cells incubated with activated T cells (ATCs) showed that PD-L1-binding BiICEs, CS-BiICE (SEQ ID NO: 342 heterodimerized with SEQ ID NO: 347) and SS-BiICE (SEQ ID NO: 346 heterodimerized with SEQ ID NO: 347), potently induced T-cell killing against three human cancer lines: prostate cancer PC3 (FIG. 14B), triple negative breast cancer MDA-MB-231 (FIG. 14C), and patient-derived pediatric brain tumor PBT-05 (FIG. 14D). The EC50 on PC3 cells was 28 pM for CS-BiICE and 97 pM for SS-BiICE, the EC50 on MDA-MB-231 cells was 142 pM for CS-BiICE and 333 pM for SS-BiICE, and the EC50 on PBT-05 cells was 2.4 pM for CS-BiICE and 7.7 pM for SS-BiICE. In each case, the CS-BiICE was more potent than the SS-BiICE. An example tumor-killing mechanism using a BiICE is illustrated in FIG. 14E.

[0429] These assays also demonstrated that PD-L1-engagement is required for maximal activity, as pooled PD-L1 knockout PC3 cells demonstrated substantially less T-cell killing upon BiICE incubation (FIG. 14B); the small activity observed is likely related to remaining PD-L1-positive cells in the knockout pool. Since it was observed that preparations of both CS-BiICE and SS-BiICE contained impurities representing monomeric CD3-engaging scFv-Fc, a T-cell killing assay was performed using extra-purified BiICE preparations to further validate that T-cell killing activity was PD-L1-dependent. The PD-L1-engaging arm of each molecule also contains a short FLAG tag (DYKDE, SEQ ID NO: 431), so anti-FLAG-M1 affinity purification of bispecific BiICEs away from the anti-CD3 scFv-Fc monomers was performed. SDS-PAGE gels of IMAC only and IMAC plus FLAG extra-purified BiICE preparations are provided in FIG. 15A. Extra-purified BiICE preps that underwent both IMAG and FLAG purification were compared with the IMAC-purified preps in a TCK assays with PBT-05 cells, as shown in FIG. 15B. The presence of the CD3-engaging scFv-Fc monomer did not impact performance, showing the molecules' activities are dependent on bispecific engagement of both targets, and that the impurities found in the preps do not confer TCK activity. This data demonstrates that a bispecific T-cell engager built using a PD-L1-binding CDP of this disclosure and a CD3 binding moiety can cause T-cell mediated human cancer cell killing in vitro, and that is was more potent than a bispecific T-cell engager built using a PD-L1 binding CDP.

### Example 9

### In Vivo Treatment of Cancer Using a PD-L1-Binding Bispecific Immune Cell Engager

[0430] This example describes in vivo treatment of cancer using a bispecific immune cell engager (BiICE) molecule containing a PD-L1-binding CDP. As a preclinical proof of concept, the BiICE molecules, prepared and validated as described in EXAMPLE 7, were tested in mice carrying flank tumors. Nude mice carrying flank tumors, with masses of 100-200 mm³ upon enrollment, were treated with activated human T cells (ATCs, 7.5×10⁶ per dose) and 1 nmol doses of either CS-BiICE or SS-BiICE (1 nmol=100 μg SS-BiICE, 80 μg CS-BiICE per dose). T cells were activated using a T cell activation kit containing microspheres capable of binding and crosslinking CD3 and CD28 simultaneously. The two-week treatment included four BiICE injections (on days 1, 4, 8, and 11) and two ATC infusions (on days 2 and 7), as shown in the experimental timeline provided in FIG. 16A. Tumor size was measured over time. Mice were removed from study and euthanized when tumors reached 1500 mm³, if tumors developed an open ulcer on their surface, or if body weight dropped to 80% of the starting value. PC3 and MDA-MB-231 flank tumors were tested. PC3-bearing mice treated with ATCs and SS-BiICE lived almost 2.5× longer (median survival 61.5 days post-enrollment) than ATC-only mice (median survival 25 days), who themselves outlived vehicle-only mice (median survival 20 days), as shown in FIG. 16B. However, 9 out of 10 PC3-bearing mice treated with ATCs and SS-BiICE eventually required euthanasia based on tumor regrowth. With ATC and CS-BiICE treatment, only 1 of 10 mice with PC3 tumors required euthanasia; the other nine survived until culling at the conclusion of the experiment on Day 95 due to apparent complete elimination of the tumors. No overt signs of toxicity (weight loss or observed behavioral changes) were apparent in either BiICE treatment group. Weight trends of the mice treatment groups over the course of the study are shown in FIG. 17. Tumor volume of PC3 tumors were measured over the course of the study, as shown in FIG. 16C. These results demonstrated that 8 of 10 SS-BiICE mice responded to treatment, but of the 8 responders, 7 eventually saw re-growth of their tumors. In contrast, in the 9 of 10 CS-BiICE responders, all 9 demonstrated complete tumor clearance. A second cohort of PC3 flank tumor-bearing mice, as shown in FIG. 16D and FIG. 16E, validated the CS-BiICE elimination, while also demonstrating that anti-PD-L1 antibody durvalumab has no effect in this setting, showing that the BiICE effect is not simply due to inhibition of PD-L1, and that reduction in dose of CS-BiICE by 10 fold produced similar tumor elimination effects. These results indicated that CS-BiICE is at least 10 times as potent as SS-BiICE, because a 1/10 dose (0.1 nmol) of CS-BiICE eliminated PC3 tumors while a full SS-BiICE dose (1 nmol) did not.

[0431] In MDA-MB-231 tumors, for which the BiICEs demonstrated lower potency in vitro, both BiICEs substantially increased lifespan, as shown in FIG. 16F; median survival of 33 days in ATC-only mice was extended to 49 and 52 days with ATC+SS-BiICE and ATC+CS-BiICE, respectively, though no mice demonstrated complete MDA-MB-231 tumor clearance. Comparing the BiICEs in MDA-MB-231 flank tumors, CS-BiICE treatment did not significantly extend survival relative to SS-BiICE treatment, though CS-BiICE treatment did generate slower tumor growth kinetics than SS-BiICE (FIG. 1611), as measured by how long after enrollment it took for tumors to triple in volume (FIG. 16G). In both tumor models and with both PD-L1-engaging modalities, PD-L1/CD3 BiICE treatment presented substantial tumor mass reduction and survival enhancement, with CS-BiICE either subtly (MDA-MB-231 tumors) or substantially (PC3 tumors) out-performing SS-BiICE.

### Example 10

### Treatment of Cancer Using a PD-L1-Binding Bispecific Immune Cell Engager

[0432] This example describes treatment of cancer using a PD-L1-binding bispecific immune cell engager. A PD-L1-binding cystine-dense peptide of any one of SEQ ID NO: 1-SEQ ID NO: 118, SEQ ID NO: 435, SEQ ID NO: 436, or SEQ ID NO: 554-SEQ ID NO: 567 is complexed with a T cell-targeting agent to form a bispecific immune cell engager. The T cell-targeting agent binds to CD3, 4-1BB, CD137, or CD28. The bispecific immune cell engager is administered to a human subject with cancer. Upon administration, the bispecific immune cell engager recruits a T cell to a PD-L1 positive cancer cell by binding to the PD-L1 positive cancer cell through the PD-L1-binding CDP and binding to the T cell through the T cell-targeting agent. The recruited T cell targets and kills the PD-L1 positive cancer cell, thereby treating the cancer.

### Example 11

### Treatment of an Autoimmune Disorder Using a PD-L1-Binding Bispecific Immune Cell Engager

[0433] This example describes treatment of an autoimmune disorder using a PD-L1-binding bispecific immune engager. A PD-L1-binding cystine-dense peptide of any one of SEQ ID NO: 1-SEQ ID NO: 118, SEQ ID NO: 435, SEQ ID NO: 436, or SEQ ID NO: 554-SEQ ID NO: 567 is complexed with an immune cell-targeting agent that binds a regulatory T cell or a mesenchymal stem cell to form a bispecific immune cell engager. The immune cell-targeting agent binds to CD25, CD13, CD29, CD44, CD71, CD73, CD90, CD105, CD166, CD27, GITR, TIGIT, LAG3, TCR, CD40L, OX40, PD-1, CTLA-4, or STRO-1. The bispecific immune cell engager is administered to a human subject with an autoimmune disorder. Upon administration, the bispecific immune cell engager recruits regulatory T cell or mesenchymal stem cell to a PD-L1 positive cell such as a pancreatic beta cell by binding to the PD-L1 positive cell through the PD-L1-binding CDP and binding to the regulatory T cell or mesenchymal stem cell through the immune cell-targeting agent. The recruited regulatory T cell or mesenchymal stem cell targets PD-L1 rich cell such as a pancreatic islets to protect them from autoimmune T-cell killing, thereby treating the autoimmune disorder, such as type 1 diabetes.

### Example 12

### Treatment of a Cancer Using a PD-L1-Binding Peptide

[0434] This example describes treatment of a cancer using a PD-L1-binding peptide. A PD-L1-binding cystine-dense peptide of any one of SEQ ID NO: 1-SEQ ID NO: 118, SEQ ID NO: 435, SEQ ID NO: 436, or SEQ ID NO: 554-SEQ ID NO: 567 is administered to a subject having cancer. Upon administration to the subject, the PD-L1-binding peptide targets and binds to PD-L1 on a PD-L1 positive cancer cell. The PD-L1-binding peptide binds at a site overlapping with the PD-1 binding interface on PD-L1, preventing PD-L1 from binding, and inhibiting PD-L1. Binding and inhibiting of PD-L1 reduces immunosuppression, reduces T cell exhaustion, and restores immune function within the cancer cell microenvironment, thereby treating the cancer.

### Example 13

### Treatment of a Cancer Using a PD-L1-Binding Peptide Complexed with an Anti-Cancer Agent

[0435] This example describes treatment of a cancer using a PD-L1-binding peptide complexed with an anti-cancer agent. A PD-L1-binding cystine-dense peptide of any one of SEQ ID NO: 1-SEQ ID NO: 118, SEQ ID NO: 435, SEQ ID NO: 436, or SEQ ID NO: 554-SEQ ID NO: 567 is complexed with an anti-cancer agent. The PD-L1-binding peptide anti-cancer agent complex is administered to a subject with cancer. Upon administration to the subject, the PD-L1-binding peptide targets and binds to PD-L1 on a PD-L1 positive cancer cell and delivers the anti-cancer agent to the cancer cell. The anti-cancer agent kills the cancer cell, thereby treating the cancer.

### Example 14

### Imaging of a Cancer Using a PD-L1-Binding Peptide Complexed with a Detectable Agent

[0436] This example describes imaging of a cancer using a PD-L1-binding peptide complexed with a detectable agent. A PD-L1-binding cystine-dense peptide of any one of SEQ ID NO: 1-SEQ ID NO: 118, SEQ ID NO: 435, SEQ ID NO: 436, or SEQ ID NO: 554-SEQ ID NO: 567 is complexed with a detectable agent. The PD-L1-binding peptide detectable agent complex is administered to a subject with cancer or suspected to have cancer. Upon administration to the subject, the PD-L1-binding peptide targets and binds to PD-L1 on a PD-L1 positive cancer cell and delivers the detectable agent to the cancer cell. The detectable agent labels the cancer cell, and the presence or absence of the detectable agent in a region of the subject suspected to have cancer is detected, thereby imaging the cancer.

### Example 15

### Treatment of a Cancer Using a PD-L1-Binding Chimeric Antigen Receptor

[0437] This example describes treatment of a cancer using a PD-L1-binding chimeric antigen receptor. A chimeric antigen receptor comprising a PD-L1-binding cystine-dense peptide of any one of SEQ ID NO: 1-SEQ ID NO: 118, SEQ ID NO: 435, SEQ ID NO: 436, or SEQ ID NO: 554-SEQ ID NO: 567 in place of a single chain variable fragment (scFv), a transmembrane domain, and an intracellular domain is expressed in a T cell collected from a subject having cancer. T cells expressing the chimeric antigen receptor are administered to the subject. Upon administration, the PD-L1-binding peptide of the chimeric antigen receptor targets and binds to a PDL-L1 positive cancer cell and delivers the T cell to the cancer cell. The T cell kills the cancer cell, thereby treating the cancer.

### Example 16

### Engineering PD-L1-Binding Peptides for pH-Dependent Binding

[0438] This example describes development and in vitro testing of PD-L1-binding peptides or peptide complexes capable of pH-dependent dissociation from PD-L1, for example, at endosomal pH (e.g., pH 5.5).

[0439] Imparting pH-dependent binding to a target-engaging domain (CDP or otherwise) can done in a variety of ways, an example of which is provided here. Here, a library of variants was designed containing histidine substitutions. Histidine residues were introduced because, of all of the natural amino acids, His is the only one with a side chain whose charge changes significantly between neutral (e.g., pH 7.4) and acidic (e.g., pH<6) endosomal conditions. This change of charge can alter binding, either directly (introducing a positive charge at low pH that could result in charge repulsion of nearby cationic groups) or indirectly (the change in charge imparts a subtle change in the binder's structure, disrupting a protein-protein interface) as the pH changes, for example from a physiologic extracellular environment to an endosomal environment as the endosome acidifies. In its simplest form, this could be executed by generating double-His doped libraries, where, for a CDP, every non-Cys, non-His residue could be substituted with a His one- or two-at-a-time. FIG. 19 shows a high-affinity PD-L1-binding CDP sequence (SEQ ID NO: 1, EEDCKVHCVKEWMAGKACAERQKSYTIGRAHCSGQKFDVFKCLDHCAAP) above and to the side of a His substitution matrix. Each black box represents a first and second site in which His could be substituted. Those purely along the top-left to bottom-right diagonal represent single His substitutions. Each black box represents a variant with one or two native-to-His substitutions, representing 821 peptide variants to be screened. A variant library containing the parental sequence and variants with one or two native-to-His substitutions was generated and tested.

[0440] The resulting histidine-enriched PD-L1-binding peptides were evaluated for their PD-L1 binding in comparative binding experiments at various pH levels or ranges. A variant library of PD-L1-binding peptides was expressed via mammalian surface display, with each variant containing zero, one or two His substitutions. These variants were tested for maintenance of binding under extracellular pH (such as pH 7.4), and for reduced binding under endosomal pH (such as pH 5.5). Sequential screening was performed, as shown in FIG. 26. The input library was initially screened for PD-L1 binding at pH 7.4, and strong binders were selected (shaded area). The second and third rounds of screening (“Sort 1” and “Sort 2,” respectively) were performed at pH 5.5 to mimic endosomal pH, and the weak binders were collected (shaded area). The final round of screening (“Sort 3”) was performed at pH 7.4, and strong binders were selected. Differential binding at pH 7.4 and pH 5.5 was observed following screening (“Sort 4”).

[0441] Variants of SEQ ID NO: 1 containing histidine substitutions at one, two, or three of E2H, M13H, and K16H amino acid positions were identified in the pooled screen as pH-dependent binders of PD-L1. pH-dependent binding was validated by measuring PD-L1 binding at pH 7.4 and pH 5.5 to cells surface expressing single variants, as shown in FIG. 27. Peptides containing substitutions at E2H (EHDCKVHCVKEWMAGKACAERQKSYTIGRAHCSGQKFDVFKCLDHCAAP, SEQ ID NO: 555), M13H (EEDCKVHCVKEWHAGKACAERQKSYTIGRAHCSGQKFDVFKCLDHCAAP, SEQ ID NO: 556), K16H (EEDCKVHCVKEWMAGHACAERQKSYTIGRAHCSGQKFDVFKCLDHCAAP, SEQ ID NO: 557), E2H and M13H (EHDCKVHCVKEWHAGKACAERQKSYTIGRAHCSGQKFDVFKCLDHCAAP, SEQ ID NO: 558), E2H and K16H (EHDCKVHCVKEWMAGHACAERQKSYTIGRAHCSGQKFDVFKCLDHCAAP, SEQ ID NO: 554), M13H and K16H (EEDCKVHCVKEWHAGHACAERQKSYTIGRAHCSGQKFDVFKCLDHCAAP, SEQ ID NO: 559), or E2H, M13H, and K16H (EHDCKVHCVKEWHAGHACAERQKSYTIGRAHCSGQKFDVFKCLDHCAAP, SEQ ID NO: 560) were compared to SEQ ID NO: 1. The variant corresponding to SEQ ID NO: 554, containing substitutions at E2H and K16H, showed strong binding to PD-L1 at pH 7.4 and substantial loss of binding at pH 5.5 (black arrow). The other variants and the parent peptide showed varying levels of PD-L1 binding at pH 7.4 and at pH 5.5, with varying degrees of pH dependence to the binding.

### Example 17

### Extension of Peptide Plasma Half-Life Using Serum Albumin-Binding Peptide Complexes

[0442] This example demonstrates a method of extending the serum or plasma half-life of a peptide using serum albumin-binding peptide complexes as disclosed herein. A peptide or peptide complex having a sequence of any one of SEQ ID NO: 1-SEQ ID NO: 118, SEQ ID NO: 435, SEQ ID NO: 436, or SEQ ID NO: 554-SEQ ID NO: 567 or SEQ ID NO: 119-SEQ ID NO: 153 is modified in order to increase its plasma half-life. The peptide and the serum half-life extending moiety are fused recombinantly, chemically synthesized as a single fusion, separately recombinantly expressed and conjugated, or separately chemically synthesized and conjugated. Fusing the peptide to a serum albumin-binding peptide extends the serum half-life of the peptide complex. The peptide or peptide complex is conjugated to a serum albumin-binding peptide, such as SA21 (SEQ ID NO: 242). Optionally, the peptide fused to SA21 has a sequence of any one of SEQ ID NO: 1, SEQ ID NO: 2, or SEQ ID NO: 342. Optionally, the peptide fused to SA21 is linked to SA21 via a peptide linker. The linker links two separately functional CDPs to incorporate serum half-life extension function into the peptide or peptide complex. The linker enables SA21 to cyclize without steric impediment from either member of the peptide complex. Alternatively, conjugation of the peptide to albumin, an albumin binder, such as Albu-tag, or a fatty acid, such as a C₁₄-C₁₅ fatty acid or palmitic acid, is used to extend plasma half-life. Plasma half-life is also optionally extended as a result of reduced immunogenicity by using minimal non-human protein sequences.

### Example 18

### Treatment of a CNS Cancer Using a PD-L1-Binding Peptide

[0443] This example describes treatment of a cancer using a PD-L1-binding peptide. A PD-L1-binding cystine-dense peptide of any one of SEQ ID NO: 1-SEQ ID NO: 118, SEQ ID NO: 435, SEQ ID NO: 436, or SEQ ID NO: 554-SEQ ID NO: 567 is fused with a TfR-binding peptide such as SEQ ID NO: 350, optionally using a linker such as SEQ ID NO: 154-SEQ ID NO: 241 or SEQ ID NO: 433. The PD-L1-binding CDP-TfR-binding peptide complex is administered to a subject having cancer. Upon administration to the subject, the PD-L1-binding CDP-TfR-binding peptide complex crosses the blood brain barrier and binds to PD-L1 on a PD-L1 positive primary or metastatic cancer cell in the brain. The PD-L1-binding CDP-TfR-binding peptide complex binds at a site overlapping with the PD-1 binding interface on PD-L1, preventing PD-L1 from binding, and inhibiting PD-L1. Binding and inhibiting of PD-L1 reduces immunosuppression, reduces T cell exhaustion, and restores immune function within the cancer cell microenvironment, thereby treating the cancer.

### Example 19

### Synthesis of a Peptide Oligonucleotide Complex for Antisense Therapy

[0444] A gene targeted for silencing in order to address a disease is identified and the desired single-stranded antisense oligonucleotide sequence is designed and synthesized based on the target coding or complementary sequence. The antisense oligonucleotide is conjugated to any PD-L1 binding peptide disclosed herein, including peptides of any one of SEQ ID NO: 1-SEQ ID NO: 118, SEQ ID NO: 435, SEQ ID NO: 436, or SEQ ID NO: 554-SEQ ID NO: 567 by any of the methods disclosed herein, for example, in accordance with EXAMPLE 26-EXAMPLE 31, such as with a cleavable or stable linker. Optionally, a nucleotide (including the backbone) is modified, such as to increase in vivo stability, to increase resistance to enzymes such as nucleases, increase protein binding including to serum proteins, increase in vivo half-life, to modify the tissue biodistribution, or to reduce immune system activation.

[0445] Any peptide oligonucleotide complexes of the present disclosure (e.g., including an oligonucleotide of any one of SEQ ID NO: 366-SEQ ID NO: 396 or SEQ ID NO: 492-SEQ ID NO: 545, linked or conjugated to SEQ ID NO: 1-SEQ ID NO: 118, SEQ ID NO: 435, SEQ ID NO: 436, or SEQ ID NO: 554-SEQ ID NO: 567) are described. Any peptide oligonucleotide complexes of the present disclosure can have oligonucleotides complementary to any target in TABLE 10, or to any of SEQ ID NO: 397-SEQ ID NO: 430 or SEQ ID NO: 546-SEQ ID NO: 549, or to any genomic or ORF sequence provided in TABLE 17.

### Example 20

### Synthesis of a Peptide-Oligonucleotide Conjugate for RNAi Therapy

[0446] A gene targeted for silencing in order to address a disease is identified and the desired double-stranded RNAi sequence is designed and synthesized based on the target coding or complementary sequence. The sense or the antisense oligonucleotide of the RNAi is conjugated to any PD-L1-binding peptide disclosed herein, including a peptide of any one of SEQ ID NO: 1-SEQ ID NO: 118, SEQ ID NO: 435, SEQ ID NO: 436, or SEQ ID NO: 554-SEQ ID NO: 567 by any of the methods disclosed herein, for example, in accordance with EXAMPLE 26-EXAMPLE 31, such as with a cleavable or stable linker. Optionally the peptide is conjugate to the sense (passenger) strand of the oligonucleotide. Optionally, a nucleotide (including the backbone) is modified, such as to increase in vivo stability, to increase resistance to enzymes such as nucleases, increase protein binding including to serum proteins, increase in vivo half-life, to modify the tissue biodistribution, or to reduce immune system activation. The sense and antisense strands are hybridized together, either before or after the conjugation.

[0447] Any peptide oligonucleotide complexes of the present disclosure (e.g., including an oligonucleotide of any one of SEQ ID NO: 366-SEQ ID NO: 396 or SEQ ID NO: 492-SEQ ID NO: 545, linked or conjugated to SEQ ID NO: 1-SEQ ID NO: 118, SEQ ID NO: 435, SEQ ID NO: 436, or SEQ ID NO: 554-SEQ ID NO: 567) are described. Any peptide oligonucleotide complexes of the present disclosure can have oligonucleotides complementary to any target in TABLE 10, or to any of SEQ ID NO: 397-SEQ ID NO: 430 or SEQ ID NO: 546-SEQ ID NO: 549, or to any genomic or ORF sequence provided in TABLE 17.

### Example 21

### Synthesis of a Peptide-Oligonucleotide Conjugate for U1 Adaptor Therapy

[0448] A gene targeted for silencing in order to address a disease is identified and the desired oligonucleotide sequence for U1 adaptor therapy is designed and synthesized based on the target coding or complementary sequence. The oligonucleotide is conjugated to any to any PD-L1-binding peptide disclosed herein, including peptide of SEQ ID NO: 1-SEQ ID NO: 118, SEQ ID NO: 435, SEQ ID NO: 436, or SEQ ID NO: 554-SEQ ID NO: 567 by any of the methods disclosed herein, for example, in accordance with EXAMPLE 26-EXAMPLE 31, such as with a cleavable or stable linker. Optionally, a nucleotide (including the backbone) is modified, such as to increase in vivo stability, to increase resistance to enzymes such as nucleases, increase protein binding including to serum proteins, increase in vivo half-life, to modify the tissue biodistribution, or to reduce immune system activation.

[0449] Any peptide oligonucleotide complexes of the present disclosure (e.g., including an oligonucleotide of any one of SEQ ID NO: 366-SEQ ID NO: 396 or SEQ ID NO: 492-SEQ ID NO: 545, linked or conjugated to SEQ ID NO: 1-SEQ ID NO: 118, SEQ ID NO: 435, SEQ ID NO: 436, or SEQ ID NO: 554-SEQ ID NO: 567) are described. Any peptide oligonucleotide complexes of the present disclosure can have oligonucleotides complementary to any target in TABLE 10, or to any of SEQ ID NO: 397-SEQ ID NO: 430 or SEQ ID NO: 546-SEQ ID NO: 549, or to any genomic or ORF sequence provided in TABLE 17.

### Example 22

### Synthesis of a Peptide-Oligonucleotide Conjugate for Aptamer Therapy

[0450] An aptamer sequence that interacts with a target molecule is selected to address a disease is identified against the target and synthesized. The aptamer oligonucleotide is conjugated to any PD-L1 binding peptide disclosed herein, including any peptide of SEQ ID NO: 1-SEQ ID NO: 118, SEQ ID NO: 435, SEQ ID NO: 436, or SEQ ID NO: 554-SEQ ID NO: 567 by any of the methods disclosed herein, for example, in accordance with EXAMPLE 26-EXAMPLE 31, such as with a cleavable or stable linker. Optionally, a nucleotide (including the backbone) is modified, such as to increase in vivo stability, to increase resistance to enzymes such as nucleases, increase protein binding including to serum proteins, increase in vivo half-life, to modify the tissue biodistribution, or to reduce immune system activation.

[0451] Any peptide oligonucleotide complexes of the present disclosure (e.g., including an oligonucleotide of any one of SEQ ID NO: 366-SEQ ID NO: 396 or SEQ ID NO: 492-SEQ ID NO: 545, linked or conjugated to SEQ ID NO: 1-SEQ ID NO: 118, SEQ ID NO: 435, SEQ ID NO: 436, or SEQ ID NO: 554-SEQ ID NO: 567) are described. Any peptide oligonucleotide complexes of the present disclosure can have oligonucleotides complementary to any target in TABLE 10, or to any of SEQ ID NO: 397-SEQ ID NO: 430 or SEQ ID NO: 546-SEQ ID NO: 549, or to any genomic or ORF sequence provided in TABLE 17.

### Example 23

### Conjugation of an Oligonucleotide and a Peptide Using Click Chemistry

[0452] An alkyne or azide group is installed in an oligonucleotide, such as by adding a hexynyl group to the 5′ end or the 3′ end of the oligonucleotide, installation of a 5-Octadiynyl dU, installation of a DIBO at the 5′ end using, which is optionally installed using a DIBO phosphoramidite, or installation of an azide group by use of an NHS ester reaction linking an azide group to a dT base. An azide or an alkyne group is installed on a peptide, such as by incorporating an N-terminal 6-azidohexanoic acid, an azidohomoalanine residue, or homopropargyl glycine residue. Optionally, the alkyne group comprises a strained ring such as strained cyclooctyne ring, such as DIBO. The oligonucleotide is conjugated to any PD-L1 binding peptide disclosed herein, including any peptide of SEQ ID NO: 1-SEQ ID NO: 118, SEQ ID NO: 435, SEQ ID NO: 436, or SEQ ID NO: 554-SEQ ID NO: 567. The oligonucleotide and the peptide are conjugated together by combining an azide group on one with the alkyne group on the other using a copper-catalyzed azide-alkyne cycloaddition or a strain-promoted azide-alkyne cycloaddition to form a triazole bond.

[0453] Any peptide oligonucleotide complexes of the present disclosure may be so modified with an alkyne or azide group and are described. Any peptide oligonucleotide complexes of the present disclosure (e.g., including an oligonucleotide of any one of SEQ ID NO: 366-SEQ ID NO: 396 or SEQ ID NO: 492-SEQ ID NO: 545, linked or conjugated to SEQ ID NO: 1-SEQ ID NO: 118, SEQ ID NO: 435, SEQ ID NO: 436, or SEQ ID NO: 554-SEQ ID NO: 567) are described. Any peptide oligonucleotide complexes of the present disclosure can have oligonucleotides complementary to any target in TABLE 10, or to any of SEQ ID NO: 397-SEQ ID NO: 430 or SEQ ID NO: 546-SEQ ID NO: 549, or to any genomic or ORF sequence provided in TABLE 17.

### Example 24

### Conjugation of an RNAi Sequence and a Peptide Using Click Chemistry

[0454] An alkyne group within a strained cyclooctyne is installed on an oligonucleotide, optionally linked to either the 5′ or the 3′ end of a sense or antisense strand. Optionally the strained cyclooctyne is DIBO, which is optionally installed on the 5′ end using a DIBO phosphoramidite. An azide group is installed on a peptide. Optionally, a 6-azidohexanoyl group is added to the N-terminus of any one of SEQ ID NO: 1-SEQ ID NO: 118, SEQ ID NO: 435, SEQ ID NO: 436, or SEQ ID NO: 554-SEQ ID NO: 567, optionally with a linker in between the 6-azidohexanoyl group and the peptide. Optionally, the peptide is prepared as a TFA salt form. The alkyne-containing oligonucleotide and the azide-containing peptide are contacted together, such as in a buffer, solution, or solvent. The azide and the alkyne react to form a triazole bond that links the oligonucleotide and the peptide. The sense and antisense strands of the RNAi are hybridized together, either before or after the conjugation reaction.

[0455] Any peptide oligonucleotide complexes of the present disclosure may be modified to include an alkyne group within a strained cyclooctyne and are described. Any peptide oligonucleotide complexes of the present disclosure (e.g., including an oligonucleotide of any one of SEQ ID NO: 366-SEQ ID NO: 396 or SEQ ID NO: 492-SEQ ID NO: 545, linked or conjugated to SEQ ID NO: 1-SEQ ID NO: 118, SEQ ID NO: 435, SEQ ID NO: 436, or SEQ ID NO: 554-SEQ ID NO: 567) are described. Any peptide oligonucleotide complexes of the present disclosure can have oligonucleotides complementary to any target in TABLE 10, or to any of SEQ ID NO: 397-SEQ ID NO: 430 or SEQ ID NO: 546-SEQ ID NO: 549, or to any genomic or ORF sequence provided in TABLE 17.

### Example 25

### Conjugation of a U1 Adapter Sequence and a Peptide Using Click Chemistry

[0456] An alkyne group within a strained cyclooctyne is installed on an oligonucleotide, optionally linked to either the 5′ or the 3′ end of a sequence, designed for U1 adapter therapy. Optionally the strained cyclooctyne is DIBO, which is optionally installed on the 5′ end using a DIBO phosphoramidite. An azide group is installed on a peptide. Optionally, the peptide is prepared as a TFA salt form. The alkyne-containing oligonucleotide and the azide-containing peptide are contacted together, such as in a buffer, solution, or solvent. The azide and the alkyne react to form a triazole bond that links the oligonucleotide and the peptide.

[0457] Any peptide oligonucleotide complexes of the present disclosure may be modified with an alkyne group within a strained cyclooctyne are described. Any peptide oligonucleotide complexes of the present disclosure (e.g., including an oligonucleotide of any one of SEQ ID NO: 366-SEQ ID NO: 396 or SEQ ID NO: 492-SEQ ID NO: 545, linked or conjugated to SEQ ID NO: 1-SEQ ID NO: 118, SEQ ID NO: 435, SEQ ID NO: 436, or SEQ ID NO: 554-SEQ ID NO: 567) are described. Any peptide oligonucleotide complexes of the present disclosure can have oligonucleotides complementary to any target in TABLE 10, or to any of SEQ ID NO: 397-SEQ ID NO: 430 or SEQ ID NO: 546-SEQ ID NO: 549, or to any genomic or ORF sequence provided in TABLE 17.

### Example 26

### Installation of a Thiol Group, an Amine Group, or an Aldehyde Group in an Oligonucleotide

[0458] This example describes incorporation of a thiol group, an amine group, or an aldehyde group in RNA or DNA or any oligonucleotide. FIG. 24A-FIG. 24E illustrates incorporation or addition of these groups on RNA or DNA. A thiol group is added on an oligonucleotide, using EDC and imidazole to activate the 5′ phosphate group to a phosphorylimidazolide, and by subsequently reacting the resulting product with cystamine. This is followed by reduction with dithiothreitol (DTT) to form a phosphoramidite linkage to a free thiol group. A thiol group is, alternatively, added on an oligonucleotide by incorporating a phosphoramidite that contains a thiol during solid-phase phosphoramidite oligonucleotide synthesis, at either the 5′-end or the 3′-end of the oligonucleotide as shown in FIG. 24A-FIG. 24E. The phosphoramidite used during synthesis can have a protecting group on the thiol during synthesis that is removed during cleavage, purification, and workup. FIG. 24A illustrates structures of oligonucleotides containing a 5′-thiol (thiohexyl; C6) modification (left), and a 3′-thiol (C3) modification (right), as shown at https://www.atdbio.com/content/50/Thiol-modified-oligonucleotides.

[0459] An amine group is added on RNA or DNA by incorporating a phosphoramidite during synthesis that contains a protected amino group that is later deprotected. FIG. 24B illustrates an MMT-hexylaminolinker phosphoramidite. FIG. 24C illustrates a TFA-pentylaminolinker phosphoramidite, as shown at https://www.sigmaaldrich.com/catalog/product/sigma/m01023hh?lang=en&region=US.

[0460] Alternatively, thiol or amine containing oligonucleotide residues are included within the sequence at any chosen location in RNA or DNA, such as described by Jin et al. (J Org Chem. 2005 May 27; 70(11):4284-99). FIG. 24D illustrates RNA residues incorporating amine or thiol residues, as presented in Jin et al. (J Org Chem. 2005 May 27; 70(11):4284-99). Also, an oligonucleotide residue that contains a phosphorothioate group within the phosphodiester backbone (where a sulfur atom replaces a non-bridging oxygen in the phosphate backbone of the oligonucleotide) provides a reactive group that is similarly used for conjugation to a thiol group. Use of the phosphorothioate containing residues can also make the RNA more resistant to nuclease degradation.

[0461] FIG. 24E illustrates oligonucleotides with aminohexyl modifications at the 5′ (left) and 3′ ends (right).

[0462] Aldehyde functional groups can be incorporated at the 3′ end of RNA by using periodate oxidation to convert the diol into two aldehyde groups.

[0463] Other methods of incorporating or modifying functional groups are carried out using techniques set forth in Bioconjugate Techniques, by Greg Hermanson, 3rd edition.

[0464] Any peptide oligonucleotide complexes of the present disclosure may be modified with a thiol group, an amine group, or an aldehyde group and are described. Any peptide oligonucleotide complexes of the present disclosure (e.g., including an oligonucleotide of any one of SEQ ID NO: 366-SEQ ID NO: 396 or SEQ ID NO: 492-SEQ ID NO: 545, linked or conjugated to SEQ ID NO: 1-SEQ ID NO: 118, SEQ ID NO: 435, SEQ ID NO: 436, or SEQ ID NO: 554-SEQ ID NO: 567) are described. Any peptide oligonucleotide complexes of the present disclosure can have oligonucleotides complementary to any target in TABLE 10, or to any of SEQ ID NO: 397-SEQ ID NO: 430 or SEQ ID NO: 546-SEQ ID NO: 549, or to any genomic or ORF sequence provided in TABLE 17.

### Example 27

### Generation of Cleavable Linkers Between an Oligonucleotide with a Peptide

[0465] This example describes generation of cleavable linkers between an oligonucleotide with any one of peptides of SEQ ID NO: 1-SEQ ID NO: 118, SEQ ID NO: 435, SEQ ID NO: 436, or SEQ ID NO: 554-SEQ ID NO: 567. A disulfide linker is generated by combining a thiol-containing oligonucleotide with a peptide comprising a free thiol group. The thiol is incorporated on the peptide using Traut's reagent, SATA, SPDP or other appropriate reagents on a reactive amine (such as a heterobifunctional SPDP and NHS ester linker with the N-terminus or a lysine residue), or by incorporating a free cysteine residue in the peptide, as shown in FIG. 25. The disulfide linker is cleaved in the reducing environment of the cytoplasm or in the endosomal/lysosomal pathway.

[0466] An ester linkage is generated by combining a free hydroxyl group (such as on the 3′ end of an oligonucleotide) with a carboxylic acid group on the peptide (such as from the C-terminus, an aspartic acid, glutamic acid residue, or introduced via a linker to a lysine residue or the N-terminus) such as via Fisher esterification or via use of an acyl chloride. The ester linker is cleaved by hydrolysis, which is accelerated by the lower pH of endosomes and lysosomes, or by enzymatic esterase cleavage.

[0467] An oxime or hydrazone linkage is generated by combining an aldehyde group on the oligonucleotide with a peptide that has been functionalized with an aminooxy group (to form an oxime linkage) or a hydrazide group (to form a hydrazone linkage). The stability or lability of an oxime or hydrazone linkage is tailored by neighboring groups (Kalia et al., Angew Chem Int Ed Engl. 2008; 47(39):7523-6), and hydrolytic cleavage is accelerated in acidic compartments such as the endosome/lysosome.

[0468] A hydrazide group is incorporated on a peptide by reacting adipic acid dihydrazide or carbohydrazide with carboxylic acid groups in the C-terminus or in aspartic or glutamic acid residues. An aminooxy group is incorporated on a peptide by reacting the N-terminus or a lysine residue with a heterobifunctional molecule containing an NHS ester on one end and a phthalimidoxy group on the other end, followed by cleavage with hydrazine. The reaction is, optionally, catalyzed by addition of aniline.

[0469] The cleavage rate of any linker is tuned, for example, by modifying the electron density in the vicinity of the cleavable link or by sterically affecting access to the cleavage site (e.g., by adding bulky groups, such as methyl groups, ethyl groups, or cyclic groups).

[0470] Cleavable linkers are, alternatively, generated using methods set forth in Bioconjugate Techniques, by Greg Hermanson, 3rd edition.

[0471] Installation of a thiol, amine, or aldehyde groups in RNA or DNA, as a functional handle, is carried out as described above in EXAMPLE 26.

[0472] Any peptide oligonucleotide complexes of the present may contain a cleavable linker and are described. Any peptide oligonucleotide complexes of the present disclosure (e.g., including an oligonucleotide of any one of SEQ ID NO: 366-SEQ ID NO: 396 or SEQ ID NO: 492-SEQ ID NO: 545, linked or conjugated to SEQ ID NO: 1-SEQ ID NO: 118, SEQ ID NO: 435, SEQ ID NO: 436, or SEQ ID NO: 554-SEQ ID NO: 567) are described. Any peptide oligonucleotide complexes of the present disclosure can have oligonucleotides complementary to any target in TABLE 10, or to any of SEQ ID NO: 397-SEQ ID NO: 430 or SEQ ID NO: 546-SEQ ID NO: 549, or to any genomic or ORF sequence provided in TABLE 17.

### Example 28

### Generation of Stable Linkers Between an Oligonucleotide and a Peptide

[0473] This example describes generation of a stable linkers between RNA, DNA, or any oligonucleotide, with any one of peptides of SEQ ID NO: 1-SEQ ID NO: 118, SEQ ID NO: 435, SEQ ID NO: 436, or SEQ ID NO: 554-SEQ ID NO: 567. A stable linker through a secondary amine is generated by reductive amination, achieved by combining an aldehyde-containing oligonucleotide with the amine at the N-terminus of a peptide or in a lysine residue, followed by reduction with sodium cyanoborohydride.

[0474] A stable amide linkage is generated by combining an amine group on an oligonucleotide with the carboxylate at the C-terminus of a peptide or in an aspartic acid or glutamic acid residues.

[0475] A stable carbamate linkage is generated by activating a hydroxyl group in an oligonucleotide with carbonyldiimidazole (CDI) or N,N′-disuccinimidyl carbonate (DSC) and subsequently reacted with a peptide's N-terminus or lysine residue.

[0476] A maleimide linker is created by combining a thiol-containing oligonucleotide with a maleimide functionalized peptide. The peptide is functionalized using an NHS-X-maleimide heterobifunctional agent on a reactive amine in the peptide, wherein X is any linker. A maleimide linker is used as a stable linker or as a slowly cleavable linker, which is cleaved by exchange with other thiol-containing molecules in biological fluids. The maleimide linker is also stabilized by hydrolyzing the succinimide moiety of the linker using various substituents, including those described in Fontaine et al., Bioconjugate Chem., 2015, 26 (1), pp 145-152.

[0477] Other methods of incorporating, adding, or modifying functional groups in polynucleotides, for example, are carried out using techniques set forth in Bioconjugate Techniques, by Greg Hermanson, 3rd edition.

[0478] Installation of a thiol, amine, or aldehyde groups in an oligonucleotide, as a functional handle, is carried out as described above in EXAMPLE 26.

[0479] Any peptide oligonucleotide complexes of the present disclosure may contain a stable linker and are described. Any peptide oligonucleotide complexes of the present disclosure (e.g., including an oligonucleotide of any one of SEQ ID NO: 366-SEQ ID NO: 396 or SEQ ID NO: 492-SEQ ID NO: 545, linked or conjugated to SEQ ID NO: 1-SEQ ID NO: 118, SEQ ID NO: 435, SEQ ID NO: 436, or SEQ ID NO: 554-SEQ ID NO: 567) are described. Any peptide oligonucleotide complexes of the present disclosure can have oligonucleotides complementary to any target in TABLE 10, or to any of SEQ ID NO: 397-SEQ ID NO: 430 or SEQ ID NO: 546-SEQ ID NO: 549, or to any genomic or ORF sequence provided in TABLE 17.

### Example 29

### Generation of an Enzyme Cleavable Linkage Between an Oligonucleotide and a Peptide

[0480] This example describes generation of an enzyme cleavable linkage between RNA, DNA, or any oligonucleotide, and any one of peptides of SEQ ID NO: 1-SEQ ID NO: 118, SEQ ID NO: 435, SEQ ID NO: 436, or SEQ ID NO: 554-SEQ ID NO: 567. An enzymatically cleavable linkage is generated between an oligonucleotide and a peptide. The conjugate with a cleavable linkage is administered in vitro or in vivo and is cleaved by enzymes in the cells or body, releasing the oligonucleotide. The enzyme is present in the endosome/lysosome, the cytosol, the cell surface, or is upregulated in the tumor microenvironment or the tissue microenvironment. These enzymes include, but are not limited to, cathepsins (such as all those listed in Kramer et al., Trends Pharmacol Sci. 2017 October; 38(10):873-898) such as cathepsin B, glucoronidases including beta-glucuronidase, hyaluronidase and matrix metalloproteases, such as MMP-1, 2, 7, 9, 13, or 14 (Kessenbrock et al., Cell. 2010 Apr. 2; 141(1): 52-67). Cathepsin or MMPs cleave amino acid sequences of any one of SEQ ID NO: 200, SEQ TD NO: 204, or SEQ ID NO: 216-SEQ TD NO: 241 or SEQ TD NO: 433, shown below in TABLE 14 (see also Nagase, Hideaki. “Substrate specificity of MMPs.” Matrix Metalloproteinase Inhibitors in Cancer Therapy. Humana Press, 2001. 39-66; Dal Corso et al., Bioconjugate Chem., 2017, 28 (7), pp 1826-1833; Dal Corso et al., Chemistry—A European Journal 21.18 (2015): 6921-6929; Doronina et al., Bioconjug Chem. 2008 October; 19(10):1960-3). Glucuronidase linkers include any one of those described in Jeffrey et al., Bioconjugate Chem., 2006, 17 (3), pp 831-840.

TABLE 14
Enzymatically Cleavable Linkers

| | | May be |
|---|---|---|
| SEQ ID NO | Sequence | Cleaved By |
| SEQ ID NO: 200 | Val-Ala | Cathepsin |
| SEQ ID NO: 204 | Val-Lys | Cathepsin |
| SEQ ID NO: 216 | Val-Arg | Cathepsin |
| SEQ ID NO: 217 | Val-Cit | Cathepsin |
| SEQ ID NO: 218 | Phe-Lys | Cathepsin |
| SEQ ID NO: 219 | Met-Lys | Cathepsin |
| SEQ ID NO: 220 | Asn-Lys | Cathepsin |
| SEQ ID NO: 221 | Ile-Pro | Cathepsin |
| SEQ ID NO: 222 | Gly-Ile | MMP |
| SEQ ID NO: 223 | Gly-Leu | MMP |
| SEQ ID NO: 224 | Gly-Tyr | MMP |
| SEQ ID NO: 225 | Gly-Met | MMP |
| SEQ ID NO: 226 | Met-Ile | MMP |
| SEQ ID NO: 227 | Ala-Ile | MMP |
| SEQ ID NO: 228 | Pro-Ile | MMP |
| SEQ ID NO: 229 | Gly-Pro-Gln-Gly- | MMP |
| | Ile-Ala-Gly-Gln | |
| SEQ ID NO: 230 | Gly-Pro-Gln-Gly- | MMP |
| | Ile-Phe-Gly-Gln | |
| SEQ ID NO: 231 | Gly-Pro-Gln-Gly- | MMP |
| | Ile-Trp-Gly-Gln | |
| SEQ ID NO: 232 | Gly-Pro-Gln-Gly- | MMP |
| | Ile-Leu-Gly-Gln | |
| SEQ ID NO: 233 | Gly-Pro-Gln-Gly- | MMP |
| | Ile-Arg-Gly-Gln | |
| SEQ ID NO: 234 | Gly-Pro-Leu-Gly- | MMP |
| | Ile-Ala-Gly-Gln | |
| SEQ ID NO: 235 | Gly-Pro-Met-Gly- | MMP |
| | Ile-Ala-Gly-Gln | |
| SEQ ID NO: 236 | Gly-Pro-Tyr-Gly- | MMP |
| | Ile-Ala-Gly-Gln | |
| SEQ ID NO: 237 | GSVAGS | Cathepsin |
| SEQ ID NO: 238 | GGGGSVAGGGGS | Cathepsin |
| SEQ ID NO: 239 | GGGGSGGGGSVAGGGG | Cathepsin |
| | SGGGGS | |
| SEQ ID NO: 240 | GGGGSGGGGSPLGLAG | |
| | GGGGSGGGGS | |
| SEQ ID NO: 241 | AEAAAKEAAAKAVAAE | |
| | AAAKEAAAKA | |

[0481] A Val-Cit-PABC enzymatically cleavable linker, such as described in Jain et al., Pharm Res. 2015 November; 32(11):3526-40, is created by conjugating the PABC end to an amine group on the oligonucleotide. The valine end is further linked to the peptide, for example, by generating an amide bond to the C-terminus of the peptide. A spacer on either side of the molecule is optionally incorporated in order to facilitate steric access of the enzyme to the Val-Cit linkage (SEQ ID NO: 217). The linkage to the peptide is, alternatively, generated by activating the N-terminus of the peptide with SATA and creating a thiol group, which is subsequently reacted to a maleimidocaproyl group attached to the N-terminus of the Val-Cit pair (SEQ ID NO: 217). Upon cleavage by cathepsin B, the self-immolative PABC group spontaneously eliminates, releasing the amine-containing oligonucleotide with no further chemical modifications. Other amino acid pairs include Glu-Glu, Glu-Gly, and Gly-Phe-Leu-Gly (SEQ ID NO: 551).

[0482] Installation of a thiol, amine, or aldehyde group in RNA or DNA, as a functional handle, is carried out as described above in EXAMPLE 26.

[0483] Any peptide oligonucleotide complexes of the present disclosure may contain an enzyme cleavable linker and are described. Any peptide oligonucleotide complexes of the present disclosure (e.g., including an oligonucleotide of any one of SEQ ID NO: 366-SEQ ID NO: 396 or SEQ ID NO: 492-SEQ ID NO: 545, linked or conjugated to SEQ ID NO: 1-SEQ ID NO: 118, SEQ ID NO: 435, SEQ ID NO: 436, or SEQ ID NO: 554-SEQ ID NO: 567) are described. Any peptide oligonucleotide complexes of the present disclosure can have oligonucleotides complementary to any target in TABLE 10, or to any of SEQ ID NO: 397-SEQ ID NO: 430 or SEQ ID NO: 546-SEQ ID NO: 549, or to any genomic or ORF sequence provided in TABLE 17.

### Example 30

### Conjugation of an Oligonucleotide and a Peptide

[0484] This example describes conjugation of an oligonucleotide to a peptide of the present disclosure. The peptide is SEQ ID NO: 1. The N-terminus of SEQ ID NO: 1 is conjugated via reductive amination to 4-formyl-PBA. The PBA-containing peptide is complexed to the 3′ diol group of the oligonucleotide to form a boronate ester.

[0485] Alternatively, the oligonucleotide has a thiol-containing or phosphorothioate-containing nucleotide residue included in the sequence, during synthesis. The N-terminus of SEQ ID NO: 1 is modified with SATA (with subsequent deprotection using hydroxylamine) to form a thiol group.

[0486] Alternatively, The N-terminus of SEQ ID NO: 1) is modified with SPDP-PEG₄-NHS ester to form a protected thiol group, with a flexible hydrophilic PEG spacer. The two thiol groups in the modified oligonucleotide and SEQ ID NO: 1 are combined to form a cleavable disulfide bond. Alternatively, The N-terminus of SEQ ID NO: 1 is modified with bromoacetamido-PEG₄-TFP ester to form an amide bond, and then reacted with the thiol group within the oligonucleotide, to form a stable thioether bond.

[0487] Alternatively, the oligonucleotide has an amine-containing nucleotide included in the sequence, during synthesis. The N-terminus of SEQ ID NO: 1 is modified with SATA to form a thiol group. A maleimidocaproyl-Val-Cit-PABC linker is conjugated to the amine in the oligonucleotide and to the thiol in SEQ ID NO: 1.

[0488] Alternatively, the oligonucleotide is conjugated to the N-terminus of SEQ ID NO: 1 via reductive amination after oxidation of the 3′ diols to form a secondary amine conjugate.

[0489] Alternatively, the oligonucleotide has the 3′ end oxidized to aldehydes via periodate oxidation. The aldehyde is then reacted with the peptide of SEQ ID NO: 1, which is functionalized with an aminooxy group on the N-terminus to form a cleavable oxime bond.

[0490] Alternatively, a dsRNA is used. The 3′ end of the sense strand is synthesized with a thiol modification as shown in FIG. 24A-FIG. 24E. The N-terminus of SEQ ID NO: 1 is modified with bromoacetamido-PEG₄-TFP ester to form an amide bond, and then reacted with the thiol group within the dsRNA to form a stable thioether bond. Alternatively, the 5′ end of the sense strand or amino terminated nucleotides serves as the site of modification.

[0491] Alternatively, the peptide is any one of SEQ ID NO: 1-SEQ ID NO: 118, SEQ ID NO: 435, SEQ ID NO: 436, or SEQ ID NO: 554-SEQ ID NO: 567.

[0492] Alternatively, rather than using the N-terminus of the peptide, a lysine residue in the peptide is used. Optionally, one or more or all of the lysine residues are mutated to arginine residues so only one, or no, lysine residues are available for amine-based reactions.

[0493] Installation of a thiol, amine, or aldehyde groups in RNA or DNA, as a functional handle, is carried out as described above in EXAMPLE 26.

[0494] Optionally, the oligonucleotide is synthesized using any one or more modified bases in order to alter the stability, tissue biodistribution, immune reactivity, or any other property of the oligonucleotide.

[0495] Any peptide oligonucleotide complexes of the present disclosure (e.g., including an oligonucleotide of any one of SEQ ID NO: 366-SEQ ID NO: 396 or SEQ ID NO: 492-SEQ ID NO: 545, linked or conjugated to SEQ ID NO: 1-SEQ ID NO: 118, SEQ ID NO: 435, SEQ ID NO: 436, or SEQ ID NO: 554-SEQ ID NO: 567) are described. Any peptide oligonucleotide complexes of the present disclosure can have oligonucleotides complementary to any target in TABLE 10, or to any of SEQ ID NO: 397-SEQ ID NO: 430 or SEQ ID NO: 546-SEQ ID NO: 549, or to any genomic or ORF sequence provided in TABLE 17.

### Example 31

### Surface Plasmon Resonance (SPR) Analysis of Peptide Binding Interactions

[0496] This example illustrates surface plasmon resonance (SPR) analysis of peptide-oligonucleotide conjugate binding interactions with PD-L1.

[0497] A peptide-oligonucleotide conjugate (also referred to herein as a peptide oligonucleotide complex) is constructed by combining any of the PD-L1-binding peptides of this disclosure with an oligonucleotide. Optionally, the oligonucleotide is designed for RNase H-engaging antisense, splice-blocking antisense, siRNA, anti-miR, U1 adapter, or aptamer therapy. Optionally, a stable or cleavable linker is used between the peptide and the oligonucleotide.

[0498] The peptide-oligonucleotide conjugate is subjected to SPR (surface plasmon resonance) analysis. The affinity of the peptide-oligonucleotide to PD-L1 is measured by SPR, using either a PD-L1 moiety or the peptide-oligonucleotide conjugate as the analyte. Optionally the PD-L1 is human, murine, rat, canine, or non-human primate (e.g. cynomolgus or rhesus). The kₒₙ, k_{off}, and/or K_{D} of the peptide-oligonucleotide conjugate for PD-L1 is measured. Optionally the kₒₙ, k_{off}, and K_{D} of the peptide alone (not conjugated to the oligonucleotide) to PD-L1 is also measured. The K_{D} of the peptide-oligonucleotide conjugate to PD-L1 is found to be adequate to bind to the desired target cell and drive endocytic uptake or transcytosis of the peptide-oligonucleotide conjugate. The K_{D} of the peptide-oligonucleotide conjugate to the PD-L1 is optionally found to be less than 1 μM, less than 100 nM, less than 10 nM, less than 1 nM, or less than 0.5 nM. Optionally, the K_{D} of the peptide-oligonucleotide conjugate to the PD-L1 is found to be similar to the K_{D} of the peptide alone, such as within 100-fold, 10-fold, 5-fold, or 2-fold of each other. Optionally, the k_{off} of the peptide-oligonucleotide conjugate is found to be sufficient to allow peptide-oligonucleotide conjugate uptake into the endosome and release from PD-L1 prior to recycling or release from PD-L1 after transcytosis. In some cases, an increased PD-L1-binding affinity can correspond to a reduced transcytosis function, wherein in some cases, an increased PD-L1-binding affinity does not correspond to a change in transcytosis function compared to the reference peptide. It is assumed that the ratio of kₒₙ/k_{off} can affect the transcytosis function of a peptide, and thus modulation of kₒₙ and/or k_{off} can be used to generate PD-L1-binding peptides with optimal PD-L1 binding affinity and transcytosis function. Optionally, the linker between the peptide and the oligonucleotide and/or the oligonucleotide or peptide sequence are changed such that the kₒₙ, k_{off}, and/or K_{D} of the modified peptide-oligonucleotide conjugate to PD-L1 is closer to the desired values. Optionally, different peptide-oligonucleotide conjugates are compared, and the peptide-oligonucleotide conjugate with the most desirable kₒₙ, k_{off}, and/or K_{D} is selected for further use.

### Example 32

### Extension of Peptide Oligonucleotide Complex Plasma Half-Life

[0499] This example demonstrates a method of extending the serum or plasma half-life of a peptide as disclosed herein. A peptide oligonucleotide complex having a peptide sequence of any one of SEQ ID NO: 1-SEQ ID NO: 118, SEQ ID NO: 435, SEQ ID NO: 436, or SEQ ID NO: 554-SEQ ID NO: 567 is modified (such as modified in the peptide, the oligonucleotide, the linker, or either end) in order to increase its plasma half-life. Conjugation of the peptide oligonucleotide complex to a near infrared dye, such as Cy5.5 is used to extend serum half-life of the peptide construct. Alternatively, conjugation of the peptide oligonucleotide complex to an albumin binder, such as Albu-tag or a C₁₄-C₁₈ fatty acid, is used to extend plasma half-life. Optionally, plasma half-life is extended as a result of reduced immunogenicity by using minimal non-human protein sequences.

### Example 33

### Cell-Penetrating Peptide Oligonucleotide Complex Fusions

[0500] This example describes peptide fusions with additional cell penetrating peptides. A PD-L1-binding peptide oligonucleotide complex of the present disclosure is chemically conjugated or recombinantly expressed as a fusion to an additional cell penetrating peptide moiety. Any peptide oligonucleotide complexes of the present disclosure (e.g., including an oligonucleotide sequence of one of SEQ ID NO: 366-SEQ ID NO: 396 or SEQ ID NO: 492-SEQ ID NO: 545, linked or conjugated to SEQ ID NO: 1-SEQ ID NO: 118, SEQ ID NO: 435, SEQ ID NO: 436, or SEQ ID NO: 554-SEQ ID NO: 567) are described. Any peptide oligonucleotide complexes of the present disclosure can have oligonucleotides complementary to any target in TABLE 10, or to any of SEQ ID NO: 397-SEQ ID NO: 430 or SEQ ID NO: 546-SEQ ID NO: 549, or to any genomic or ORF sequence provided in TABLE 17. The additional cell penetrating peptide moiety is one or multiple Arg residues, such as an RRRRRRRR (SEQ ID NO: 251) sequence conjugated to, linked to, or fused at the N-terminus or C-terminus, or a Tat peptide with the sequence YGRKKRRQRRR (SEQ ID NO: 276) that is conjugated to, linked to, or fused to the N-terminus or C-terminus of any PD-L1-binding peptide of the present disclosure. Alternatively, the additional cell penetrating peptide moiety is selected from maurocaline, imperatoxin, hadrucalcin, hemicalcin, oplicalin-1, opicalcin-2, midkine (62-104), MCoTI-II, or chlorotoxin, which is fused to the N-terminus or C-terminus of any PD-L1-binding peptide of the present disclosure. Alternatively, the additional cell penetrating peptide moiety is selected from TAT such as CysTAT (SEQ ID NO: 249), S19-TAT (SEQ ID NO: 250), R8 (SEQ ID NO: 251), pAntp (SEQ ID NO: 252), Pas-TAT (SEQ ID NO: 253), Pas-R8 (SEQ ID NO: 254), Pas-FHV (SEQ ID NO: 255), Pas-pAntP (SEQ ID NO: 256), F2R4 (SEQ ID NO: 257), B55 (SEQ ID NO: 258), azurin (SEQ ID NO: 259), IMT-P8 (SEQ ID NO: 260), BR2 (SEQ ID NO: 261), OMOTAG1 (SEQ ID NO: 262), OMOTAG2 (SEQ ID NO: 263), pVEC (SEQ ID NO: 264), SynB3 (SEQ ID NO: 265), DPV1047 (SEQ ID NO: 266), C105Y (SEQ ID NO: 267), transportan (SEQ ID NO: 268), MTS (SEQ ID NO: 269), hLF (SEQ ID NO: 270), PFVYLI (SEQ ID NO: 271), or yBBR (SEQ ID NO: 272), which is fused to the N-terminus or C-terminus of any PD-L1-binding peptide of the present disclosure. Alternatively, the additional cell penetrating peptide moiety is fused to the N-terminus or C-terminus of any PD-L1-binding peptide of the present disclosure by a linker. The linker is selected from GGGSGGGSGGGS (SEQ ID NO: 163), KKYKPYVPVTTN (SEQ ID NO: 166) (linker from DkTx), or EPKSSDKTHT (SEQ ID NO: 167) (linker from human IgG3), or any other linker. Alternatively, the PD-L1-binding peptide, the additional cell penetrating peptide moiety, and, optionally, the linker are joined by other means. For example, the other means includes, but is not limited to, chemical conjugation at any location, fusion of the additional cell penetrating peptide moiety and/or the linker to the C-terminus of the PD-L1-binding peptide, co-formulation with liposomes, or other methods.

[0501] Cell-penetrating peptide fusions or conjugates are administered to a subject in need thereof. The subject is a human or animal and has a disease, such as a brain cancer or other brain condition. Upon administration, the additional cell-penetrating peptides promote crossing the cellular membranes to access intracellular compartments. Alternatively, upon administration, the PD-L1-binding peptides promote endocytosis into cells expressing PD-L1 and the PD-L1-binding peptides and/or the additional cell penetrating peptides promote release of the oligonucleotide into the cytoplasm or other subcellular compartments.

### Example 34

### Peptide Oligonucleotide Complexes to Promote Nuclear Localization

[0502] This example describes peptide complexes to promote nuclear localization. The peptide and the oligonucleotide of a PD-L1-binding peptide oligonucleotide complex of the present disclosure are recombinantly expressed or chemically synthesized and then conjugated together with a linker. The peptide within the peptide oligonucleotide complex is selected from any sequence of SEQ ID NO: 1-SEQ ID NO: 118, SEQ ID NO: 435, SEQ ID NO: 436, or SEQ ID NO: 554-SEQ ID NO: 567. Any peptide oligonucleotide complexes of the present disclosure (e.g., including an oligonucleotide sequence of any of SEQ ID NO: 366-SEQ ID NO: 396 or SEQ ID NO: 492-SEQ ID NO: 545, linked or conjugated to SEQ ID NO: 1-SEQ ID NO: 118, SEQ ID NO: 435, SEQ ID NO: 436, or SEQ ID NO: 554-SEQ ID NO: 567) are described. Any peptide oligonucleotide complexes of the present disclosure can have oligonucleotides complementary to any target in TABLE 10, or to any of SEQ ID NO: 397-SEQ ID NO: 430 or SEQ ID NO: 546-SEQ ID NO: 549, or to any genomic or ORF sequence provided in TABLE 17. The peptide oligonucleotide complexes are conjugated to, linked to, or fused to a nuclear localization signal, such as a four-residue sequence of K-K/R-X-K/R (SEQ ID NO: 434), wherein X can be any amino acid, or a variant thereof (Lange et al, J Biol Chem. 2007 Feb. 23; 282(8):5101-5). The complexes are administered to a subject in need thereof. The subject is a human or animal and has a disease, such as cancer. Upon administration, PD-L1-binding peptides promote uptake by a PD-L1 expressing cell and the nuclear localization signal promotes trafficking to the nucleus and or the PD-L1-binding peptides promote endocytosis into cells expressing PD-L1.

### Example 35

### PD-L1-Binding Peptide Oligonucleotide Complex for pH-Dependent Endosomal Delivery

[0503] This example describes development and in vitro testing of PD-L1-binding peptide oligonucleotide complexes capable of pH-dependent dissociation from PD-L1, for example, at endosomal pH (e.g., pH 5.5).

[0504] One or more additional histidine residues are introduced into the sequence of PD-L1-binding peptides within the peptide oligonucleotide complex (e.g., any one of SEQ ID NO: 1-SEQ ID NO: 118, SEQ ID NO: 435, SEQ ID NO: 436, or SEQ ID NO: 554-SEQ ID NO: 567) complexed with an oligonucleotide. The resulting histidine-enriched PD-L1-binding peptide oligonucleotide complexes are evaluated for their PD-L1 binding in comparative binding experiments at various pH levels or ranges. Peptides with high PD-L1 binding affinity at physiological pH but a significantly reduced binding affinity at lower pH levels such as endosomal pH of 5.5 are selected for cellular binding, uptake, and intra-endosomal or intra-vesicular release experiments.

[0505] PD-L1-binding peptide oligonucleotide complexes with high endosomal delivery capabilities are identified and characterized. These results demonstrate that the PD-L1-binding peptide oligonucleotide complexes of the present disclosure can exhibit, or can be modified to exhibit pH-dependent PD-L1 binding kinetics that allows intra-vesicular release of PD-L1-binding peptide oligonucleotide complexes and PD-L1-binding peptide oligonucleotide complex comprising one or more active agents for endosomal and/or intracellular delivery. Higher levels of the peptide oligonucleotide complex may be delivered to or accumulate in the endosome due to dissociation from PD-L1 prior to PD-L1 recycling back to the cell surface.

[0506] In order to improve the intracellular delivery functions, the PD-L1-binding peptide oligonucleotide complexes as described herein are optionally modified to comprise a motif that facilitates low-pH endosomal release or escape of the peptide oligonucleotide complex or are constructed with a cleavable linker.

[0507] Cellular uptake and release experiments demonstrate that the PD-L1-binding peptide oligonucleotide complexes that comprise a motif for low-pH endosomal escape show are present in the cytosol at higher concentrations compared to peptides that do not comprise the motif for low-pH endosomal escape. This data demonstrates that the PD-L1-binding oligonucleotide complexes of the present disclosure can be successfully modified for enhanced intra-vesicular and intra-cellular delivery, including to subcellular compartments, while retaining their PD-L1 binding capabilities. These peptide oligonucleotide complexes can optionally be used in combination with various therapeutic and/or compounds for treatment and/or diagnosis of diseases and conditions.

### Example 36

### Comparison of Dose Toxicity of a PD-L1-Binding Peptide Oligonucleotide Complex to a PD-L1-Binding Antibody Oligonucleotide Complex

[0508] This example describes the comparison of the dose toxicity of a PD-L1-binding peptide oligonucleotide complex of this disclosure to anti-PD-L1 antibody oligonucleotide complex when administered to a murine subject. Optionally, the oligonucleotide targeting agent targets a gene that encodes for BACE. An anti-PD-L1 antibody oligonucleotide complex is administered to a subject at doses of 5 mg/kg, 25 mg/kg or 50 mg/kg, corresponding to molar doses per 25 g mouse mass of about 0.84 nmol, 4.2 nmol, and 8.4 nmol, respectively, as described in Couch, et al, 2013 (Couch et al, Sci Transl Med. 2013 May 1; 5(183):183ra57). A PD-L1-binding peptide oligonucleotide complex of this disclosure is administered to a subject at doses of about 31 mg/kg, corresponding to a molar concentration of about 100 nmol per 25 g mouse mass. Alternatively, a PD-L1-binding peptide oligonucleotide complex of this disclosure is administered to a subject at doses of 0.84 nmol, 4.2 nmol and 8.4 nmol or 100 nmol. Subjects receiving 31 mg/kg, or about 100 nmol per 25 g mouse mass, of the PD-L1-binding peptide oligonucleotide complex show effective pharmacodynamic and pharmacokinetic properties without signs of distress or toxicity over the course of at least 24 hours. Meanwhile subjects receiving 5 mg/kg, or about 0.84 nmol per 25 g mouse mass, of the anti-PD-L1 antibody oligonucleotide complex show reduced therapeutic efficacy, such as reduced pharmacodynamic amyloid beta inhibition, as compared to the subjects receiving 25 or 50 mg/kg, or 4.2 or 0.4 nmol per 25 kg mouse mass. The 25 or 50 mg/kg, or 4.2 or 0.4 nmol per 25 kg mouse mass, doses of the anti-PD-L1 antibody induce lethargy, distress, and hemolysis, or reduced reticulocyte count or other toxicities, within at least 30 minutes of administration. The results demonstrate that the therapeutic window (the dosage above which a therapeutic pharmacodynamic response is seen but below which toxicity is observed) is wider for peptide-based therapeutics than for antibody-based therapeutics. The results further demonstrate that PD-L1-binding peptide oligonucleotide complex-based therapeutics show less off-target binding and lower immune response as compared to PD-L1-binding antibody-based therapeutics, due to the smaller protein lengths (approximately 50 amino acids) providing fewer epitopes for an adaptive immune response and smaller surface area.

### Example 37

### PD-L1-Binding Peptide Oligonucleotide Complex Using siRNA for Treatment of Type 2 Diabetes

[0509] This example describes treatment of type 2 diabetes using a PD-L1-binding peptide nucleotide complex described herein. The transcription factor FoxO1 is required for beta cell identity and optimal insulin production. Its inhibition (via acetylation) by transcription cofactors p300 and/or cyclic AMP response element-binding (CREB) protein (CBP) results in de-differentiation of beta cells and reduction of insulin production capacity. While whole-body disruption of p300 or CBP would be harmful as they are not specific to pancreatic beta cells, targeting a p300 or CBP antisense construct to pancreatic beta cells via conjugation to a PD-L1-binding peptide could ameliorate Type 2 diabetes symptoms or progression. This example demonstrates this approach for targeting CBP, but an equivalent strategy targeting p300 is viable. The nucleic acid portion of the peptide oligonucleotide complex comprises siRNA targeting the CBP transcript. Short sequences in the CBP mRNA are identified (e.g., 21 nt sequences in the CBP mRNA), beginning with AA and ending in TT (or UU in RNA) that are between 30-60% G/C in content and complementary sequence to the CBP mRNA used in the complex. For example, any 21 mer complementary across the CBP mRNA that has imperfect complementarity (e.g., no more than 85% complementarity, or having at least 3 to 4 mismatches) or no to low complementarity (e.g., no more than 75%, 65%, 50%, or 30% complementarity) relative to other sequences in transcriptome (to reduce off target effects) may be used, with an optimal length that fits into RISC complex (e.g., a 21 mer+/−up to 5 nt).

[0510] The siRNA may bind a target molecule of any one of SEQ ID NO: 546-SEQ ID NO: 549. Duplex structures (e.g., dsRNA) for modulating CBP mRNA can include: SEQ ID NO: 532-SEQ ID NO: 539, provided in TABLE 13 describes exemplary CBP siRNAs which are four siRNA pairs. It is understood to that within each pair of complimentary sequences described (e.g., SEQ ID NO: 532 and SEQ ID NO: 533, SEQ ID NO: 534 and SEQ ID NO: 535, etc.) are together part of the same complex and are partial reverse complements to one another.

TABLE 13
Examples of CBP siRNAs

| SEQ ID NO | Sequence |
|---|---|
| SEQ ID NO: 532 | 3′-AUCAUUGAGACCGGUAUCGAA-5′ |
| SEQ ID NO: 533 | 5′-AAUAGUAACUCUGGCCAUAGC-3′ |
| SEQ ID NO: 534 | 3′-GUCGUCUACUUCGUCGUCUAA-5′ |
| SEQ ID NO: 535 | 5′-AACAGCAGAUGAAGCAGCAGA-3′ |
| SEQ ID NO: 536 | 3′-UUAGGUCCGUAGAUCCAAGAA-5′ |
| SEQ ID NO: 537 | 5′-AAAAUCCAGGCAUCUAGGUUC-3′ |
| SEQ ID NO: 538 | 3′-ACAAUGAUCUCUUCUUCGGAA-5′ |
| SEQ ID NO: 539 | 5′-AAUGUUACUAGAGAAGAAGCC-3′ |

[0511] Flanking ˜2-3 nucleotides are joined by phosphodiester (PO) or phosphorothioate (PS) linkages. All other backbones are PO linkages. Sugar chemistries are RNA, either regular (—OH) or 2′ modified (such as 2′-O-Me, 2′-F).

[0512] The PD-L1-binding peptide and the oligonucleotide of the peptide oligonucleotide complex are each expressed recombinantly or chemically synthesized and then conjugated together with a linker. Optionally, the linker is cleavable. Optionally, the PD-L1-binding peptide has reduced affinity for PD-L1 at pH lower than 7.4. The nucleic acid portion of the peptide oligonucleotide complex is, targeted against any portion of the CBP mRNA (e.g., NCBI Refseq ID NM_001079846.1 CREBBP [organism=Homo sapiens] [GeneID=1387], SEQ ID NO: 546), or a functional fragment thereof. Similarly, the siRNA may bind a target molecule of SEQ ID NO: 548, or a functional fragment thereof. The PD-L1-binding peptide oligonucleotide complex is administered to a subject in need thereof. The PD-L1-binding peptide oligonucleotide complex is administered intravenously, subcutaneously, intramuscularly, by suppository, or orally. The subject is a human or an animal. After administration, the PD-L1-binding peptide oligonucleotide complex accumulates in pancreatic beta cells and the CBP mRNA is degraded. The PD-L1-binding peptide nucleotide complex ameliorates the type 2 diabetes, and reduced symptoms of type 2 diabetes are exhibited. In patients these symptoms may include increased thirst, frequent urination, increased hunger, unintended weight loss, fatigue, blurred vision, slow-healing sores, frequent infections, numbness or tingling in the hands or feet, diabetic retinopathy, kidney disease (nephropathy), diabetic neuropathy, and macrovascular problems.

[0513] This data demonstrates that the PD-L1-binding peptide oligonucleotide complexes of the present disclosure effectively treat type 2 diabetes.

### Example 38

### PD-L1-Binding Peptide Oligonucleotide Complex Using a Gapmer for Treatment of Type 2 Diabetes

[0514] This example describes treatment of type 2 diabetes disease using a PD-L1-binding peptide nucleotide complex described herein. The transcription factor FoxO1 is required for beta cell identity and optimal insulin production. Its inhibition (via acetylation) by transcription cofactors p300 and/or CBP results in de-differentiation of beta cells and reduction of insulin production capacity. While whole-body disruption of p300 or CBP would be harmful as they are not specific to pancreatic beta cells, targeting a p300 or CBP antisense construct to pancreatic beta cells via conjugation to a PD-L1-binding peptide could ameliorate Type 2 diabetes symptoms or progression. This example will demonstrate this approach for targeting p300, but an equivalent strategy targeting CBP may be used. The nucleic acid portion of the peptide oligonucleotide complex comprises a gapmer targeting the p300 gene. Short sequences in the p300 mRNA are identified (e.g., 20 nt sequences in the p300 mRNA), that are greater than 40% G/C in content and complementary sequence to p300 mRNA used in the complex. For example, any 20 mer complementary to the p300 mRNA that has imperfect complementarity (e.g., no more than 85% complementarity, or having at least 3 to 4 mismatches) or no to low complementarity (e.g., no more than 75%, 65%, 50%, or 30% complementarity) relative to other sequences in transcriptome (to reduce off target effects) may be used (e.g., a 20 mer only found in the p300 gene).

[0515] Single stranded structures (e.g., ssRNA or ssDNA) for modulating p300 mRNA can include any one of SEQ ID NO: 512-SEQ ID NO: 531, provided in TABLE 5.

[0516] Any of SEQ ID NO: 512-SEQ ID NO: 531 may be synthesized as the corresponding RNA sequence, with U substituted for T. The gapmer may bind a target molecule of any one of the p300 transcript sequences derived from its open reading frame (NCBI Refseq ID NG_009817.1), which could include sequences found in its mature transcripts including NCBI Refseq IDs NM_001429.4 Homo sapiens E1A binding protein p300 (EP300), transcript variant 1, mRNA or NM_001362843.2 Homo sapiens E1A binding protein p300 (EP300), transcript variant 2, mRNA, SEQ ID NO: 548, or SEQ ID NO: 549.

[0517] For this example, one could construct ASOs with full backbone PS linkages, where all C bases are 5-methyl-C. For this example, the middle 10 nt are DNA sugars and the flanking 5 nt on each side are 2′O-MOE RNA sugars.

[0518] The peptide and the oligonucleotide of the PD-L1-binding peptide oligonucleotide complex of the disclosure are each expressed recombinantly or chemically synthesized and then conjugated together via a linker. Optionally the linker is cleavable. Optionally, the PD-L1 binding peptide has reduced affinity for PD-L1 at pH lower than 7.4. The nucleic acid portion of the peptide oligonucleotide complex is, targeted against any portion of the p300 pre-mRNA sequence derived from its open reading frame (NCBI Refseq NG_009817.1), or a functional fragment thereof including its mature transcripts such as NCBI Refseq IDs NM_001429.4 Homo sapiens E1A binding protein p300 (EP300), transcript variant 1, mRNA or NM_001362843.2 Homo sapiens E1A binding protein p300 (EP300), transcript variant 2, mRNA. The PD-L1-binding peptide oligonucleotide complex is administered to a subject in need thereof. The PD-L1-binding peptide nucleotide complex is administered direct intracranial, intravenously, subcutaneously, intramuscularly, orally, or intrathecally. The subject is a human or an animal. After administration, the PD-L1-binding peptide oligonucleotide complex accumulates in pancreatic beta cells and the CBP mRNA is degraded. The PD-L1-binding peptide nucleotide complex ameliorates the type 2 diabetes: Reduced symptoms of type 2 diabetes are exhibited. In patients these symptoms may include increased thirst, frequent urination, increased hunger, unintended weight loss, fatigue, blurred vision, slow-healing sores, frequent infections, numbness or tingling in the hands or feet, diabetic retinopathy, kidney disease (nephropathy), diabetic neuropathy, and macrovascular problems.

[0519] This data demonstrates that the PD-L1-binding peptide oligonucleotide complexes of the present disclosure effectively treat type 2 diabetes.

### Example 39

### PD-L1-Binding Peptide Oligonucleotide Complex Using an Anti-miR for Treatment of Solid Tumor

[0520] This example describes treatment of Cancers (e.g., glioblastoma multiforme (GBM), pancreatic cancer, breast cancer, colon cancer, lung cancer, head and neck cancer) using a PD-L1-binding peptide nucleotide complex described herein. Healthy tissues can express tumor suppressor genes such as PDCD4 and PTEN which control cell growth and apoptosis. The miRNA, miR-21 is a repressor of several such tumor suppressor genes, including PDCD4 and PTEN. The reduction of miR-21 hence can have utility in cancers (e.g., GBM, pancreatic cancer, breast cancer, colon cancer, lung cancer, or head and neck cancer) by restoring proper expression of tumor suppressor genes and enabling tumor suppression systems to work. The nucleic acid portion of the peptide nucleotide complex comprises an anti-miR targeting the miR-21 (i.e., anti-miR-21).

[0521] Mature miRNA guide strand of miR-21 is as follows: 5′-UAGCUUAUCAGACUGAUGUUGA-3′ (SEQ ID NO: 397). The anti-miR nucleotide may bind a target molecule of SEQ ID NO: 397. Base pairing to an anti-miR sequence would be as follows to generate a complementary anti-MIR-21 nucleic acid:

TABLE 15
Example of MIR-21 miRNA and Anti-miR Base Pairing

| SEQ ID NO: | Sequence | Name |
|---|---|---|
| SEQ ID NO: 397 | 3′-AGUUGUAGUCA | miRNA |
| | GACUAUUCGAU-5′ | |
| SEQ ID NO: 374 | 5′-UCAACAUCAGU | Full length |
| | CUGAUAAGCUA-3′ | anti-miR |

[0522] The optimal anti-miRNA must match at the seed region, typically sites 2-7 from the miRNA's 5′ end. Hence, truncations to test (to minimize length while maintaining potency) will truncate from the 5′ end of the anti-miR to maintain the 3′ end matching to the miRNA seed sequence:

TABLE 16
Examples of Anti-miR Truncations

| SEQ ID NO: | Sequence | Length |
|---|---|---|
| SEQ ID NO: 374 | UCAACAUCAGUCUGAUAAGC | 22 nucleotides |
| | UA | |
| SEQ ID NO: 375 | CAACAUCAGUCUGAUAAGCU | 21 nucleotides |
| | A | |
| SEQ ID NO: 376 | AACAUCAGUCUGAUAAGCUA | 20 nucleotides |
| SEQ ID NO: 377 | ACAUCAGUCUGAUAAGCUA | 19 nucleotides |
| SEQ ID NO: 378 | CAUCAGUCUGAUAAGCUA | 18 nucleotides |
| SEQ ID NO: 379 | AUCAGUCUGAUAAGCUA | 17 nucleotides |
| SEQ ID NO: 380 | UCAGUCUGAUAAGCUA | 16 nucleotides |
| SEQ ID NO: 381 | CAGUCUGAUAAGCUA | 15 nucleotides |

[0523] For such an exemplary anti-miR strategy, PO or PS backbone linkages are used; optionally 1-3 terminal linkages are PS. Sugars can be a mixture of DNA, 2′-O-Me, 2′-F, and/or LNA. C bases can be 5-methyl-C.

[0524] The peptide and the oligonucleotide of the PD-L1-binding peptide oligonucleotide complex of the disclosure are expressed recombinantly or chemically synthesized and the conjugated together via a linker. Optionally the linker is cleavable. Optionally the peptide has reduced affinity for PD-L1 at pH less than 7.4. The nucleic acid portion of the peptide oligonucleotide complex is, targeted against any portion of the miR-21 guide strand RNA (SEQ ID NO: 397), or a functional fragment thereof. The PD-L1-binding peptide oligonucleotide complex is administered to a subject in need thereof. The PD-L1-binding peptide oligonucleotide complex is administered intravenously, subcutaneously, intramuscularly, orally, intrathecally, intravitreally, or intratumorally. The subject is a human or an animal. Mouse models can include any of a number of xenografts of human tumor lines or primary tumor cells or other relevant cancer models. After administration, the PD-L1-binding peptide nucleotide complex accumulates diseased tissue and the miR-21 mRNA is degraded. The PD-L1-binding peptide nucleotide complex causes tumors or cancer cells (e.g., GBM, pancreatic cancer, breast cancer, colon cancer, lung cancer, or head and neck cancer) to grow more slowly, stop growing, or die. Reduced symptoms of cancers (e.g., GBM pancreatic cancer, breast cancer, colon cancer, lung cancer, head and neck cancer) may result. In patients: Reduced symptoms of cancer are exhibited and, reduction of tumor masses and prevention of re-growth (disease control).

[0525] This data demonstrates that the PD-L1-binding peptide oligonucleotide complexes of the present disclosure effectively treat Cancers (e.g., GBM, pancreatic cancer, breast cancer, colon cancer, lung cancer, or head and neck cancer).

### Example 40

### PD-L1-Binding Peptide Oligonucleotide Complex Using an Aptamer for Treatment of SARS-CoV-2

[0526] This example describes treatment of SARS-CoV-2 using a PD-L1-binding peptide oligonucleotide complex described herein. SARS-CoV-2 uses ACE2 as a major receptor for infection. With the PD-L1-binder's lung tissue accumulation potential based on basal PD-L1 expression in the lung, bringing an ACE2-inhibiting aptamer to the tissue could reduce SARS-CoV-2 proliferation and can therefore have utility in preventing and treating COVID-19. The nucleic acid portion of the peptide oligonucleotide complex comprises an aptamer targeting the ACE2 protein, optionally determined using a SELEX-based screening strategy. ACE2 is membrane-embedded, so soluble ACE2 could be a difficult reagent against which to screen. However, cells or membrane vesicles from cells over-expressing ACE2 could be exposed to a library of 20-40mer sequences of a random nature flanked by a primer-binding site. Cells or vesicles would be rinsed thoroughly and then lysed to release nucleic acids that are bound, which would be amplified by PCR. Negative selection would occur in ACE2-negative material to remove sequences non-specific to ACE2. After several rounds of positive and negative selection and amplification, individual sequences would be synthesized and tested for the ability to bind only to ACE2-expressing cells.

[0527] For such a ACE2-targeting aptamer, backbone linkages can be PO or PS; one clinical example of an aptamer, pegaptanib, uses all PO linkages. Sugars could be a mixture of DNA, RNA, 2′-O-Me, 2′-O-MOE, 2′-F, or LNA among others. Optionally, the bases are chemically modified to facilitate tighter binding or even covalent binding.

[0528] The peptide and the oligonucleotide of the PD-L1-binding peptide oligonucleotide complex of the disclosure are expressed recombinantly or chemically synthesized and then conjugated together via a linker. The nucleic acid portion of the peptide oligonucleotide complex is, targeted against any portion of the ACE2 protein, or a functional fragment thereof. The PD-L1-binding peptide oligonucleotide complex is administered to a subject in need thereof. The PD-L1-binding peptide oligonucleotide complex is administered intravenously, subcutaneously, intramuscularly, orally, intrathecally, intravitreally, or intratumorally. The subject is a human or an animal. In mouse models, the mice may be humanized for ACE2 expression. After administration, the PD-L1-binding peptide oligonucleotide complex reduces the ability of SARS-CoV-2 or viruses pseudotyped with SARS-CoV-2 Spike protein to infect or reinfect immune cells. The PD-L1-binding peptide oligonucleotide complex offers protection from infection and/or reduction of productive infection upon exposure to SARS-CoV-2 or SARS-CoV-2-Spike-pseudotyped viral particles, preventing a productive infection and the eventual generation of COVID-19 symptoms.

[0529] This data demonstrates that the PD-L1-binding peptide oligonucleotide complexes of the present disclosure effectively inhibit SARS-CoV-2 infection and development of COVID19.

[0530] Similarly, severe acute respiratory syndrome (SARS) is caused by the SARS-associated coronavirus (SARS-CoV-1), which also uses the angiotensin-converting enzyme 2 (ACE2) as its receptor on human cells. PD-L1-binding peptide oligonucleotide complexes of the present disclosure effectively inhibit SARS-CoV-1 or viruses pseudotyped with SARS-CoV-1 Spike protein to inhibit SARS-CoV-1 infection and development of SARS. Whereas MERS-COV uses the cellular receptor, dipeptidyl peptidase 4 (DPP4), PD-L1-binding peptide oligonucleotide complexes of the present disclosure, for example using a DPP4-targeting aptamer effectively inhibit MERS-COV or viruses pseudotyped with MERS-Cov Spike protein to inhibit SARS-CoV-1 infection and development of MERS.

### Example 41

### PD-L1-Binding Peptide Oligonucleotide Complex Using a U1 Adapter for Treatment of Skin Cancer

[0531] This example describes treatment of skin cancer (e.g., melanoma) using a PD-L1-binding peptide oligonucleotide complex described herein. BCL2 is an anti-apoptotic protein implicated in a number of solid tumors. Melanoma, in particular, expresses high levels of BCL2, rendering it resistant to many chemotherapeutics known to induce apoptosis. The BCL2 gene expresses the BCL2 protein, and reduction of BCL2 can have utility in skin cancer (e.g., melanoma). The nucleic acid portion of the peptide oligonucleotide complex which targets the BCL2 gene comprising a complementary nucleotide to BCL2 pre-mRNA linked to a U1 adapter. The 3′ end of the BCL2 pre-mRNA transcript maps to chromosome 18, and polyA mapping software PolyASite identifies the region near Base 63,126,800 (on hg38 genome assembly) as a likely polyA site. Short sequences in the BCL2 gene or pre-mRNA are identified (e.g., overlapping 20 nt sequences in the BCL2 pre-mRNA within 5000 bases on either side of this PolyA region), that are 30%-60% G/C in content and complementary sequence to BCL2 pre-mRNA and placed 5′ or 3′ (this example demonstrates 5′ placement) of a U1-recognition domain used in the complex. For example, any 20 mer complementary to the BCL2 pre-mRNA region that has imperfect complementarity (e.g., no more than 85% complementarity, or having at least 3 to 4 mismatches) or no to low complementarity (e.g., no more than 75%, 65%, 50%, or 30% complementarity) relative to other sequences in transcriptome (to reduce off target effects) may be tested.

[0532] An exemplary nucleic acid sequence contains a U1 adapter for modulating BCL2 mRNA that is highly active against BCL2 can include: 5′GCCGUACAGUUCCACAAAGGGCCAGGUAAGUAU-3′ (SEQ ID NO: 382), wherein the underlined portion (GCCGUACAGUUCCACAAAGG (SEQ ID NO: 552)) corresponds to the BCL2 recognition sequence and the italicized portion (GCCAGGUAAGUAU (SEQ ID NO: 370)) corresponds to the U1 recognition sequence. A U1 adapter may bind a target pre-mRNA molecule derived from the BCL2 open reading frame (NCBI Refseq ID: NG_009361.1). Any of the U1 adapters in TABLE 11 can also be linked to the BCL2 recognition sequence. Sugar modifications may include 2′-O-Me, LNA, or standard RNA or DNA among others. Backbone linkages can include PO or PS linkages.

[0533] The peptide and the oligonucleotide of the PD-L1-binding peptide oligonucleotide complex of the disclosure are expressed recombinantly or chemically synthesized and then conjugated together via a linker. Optionally, the linker is cleavable. Optionally, the peptide has reduced affinity to PD-L1 at pH less than 7.4. The nucleic acid portion of the peptide oligonucleotide complex is, targeted against BCL2 pre-mRNA derived from the BCL2 open reading frame (NCBI Refseq ID: NG_009361.1), or a functional fragment thereof including mRNA NCBI Refseq IDs NM_000633.3 BCL2 [organism=Homo sapiens] [GeneID=596][transcript=alpha] or NM_000657.3 BCL2 [organism=Homo sapiens] [GeneID=596][transcript=beta], SEQ ID NO: 411, or SEQ ID NO: 412. The PD-L1-binding peptide oligonucleotide complex is administered to a subject in need thereof. The PD-L1-binding peptide oligonucleotide complex is administered intravenously, subcutaneously, intramuscularly, orally, intrathecally, intravitreally, or intratumorally. The subject is a human or an animal. In mouse models, one would test in mouse xenograft models with flank tumors of human melanoma cells, or other relevant model. After administration, the PD-L1-binding peptide nucleotide complex accumulates in diseased tissue and the BCL2 mRNA transcription is reduced and the mRNA degraded, induction of apoptotic markers and reduced tumor growth results in treated animals. The PD-L1-binding peptide oligonucleotide complex ameliorates the skin cancer (e.g., melanoma). Reduced symptoms of skin cancer (e.g., melanoma) are exhibited.

[0534] This data demonstrates that the PD-L1-binding peptide oligonucleotide complexes of the present disclosure effectively treat skin cancer (e.g., melanoma).

### Example 42

### Design of an Oligonucleotide Sequence for a Peptide Oligonucleotide Complex

[0535] This example describes design of an oligonucleotide sequence for a target binding agent capable of binding a target molecule for use in a peptide oligonucleotide complex. A gene is targeted for modulation by a peptide oligonucleotide complex of this disclosure, optionally by a single stranded (ssDNA, ssRNA) or double stranded (dsDNA, dsRNA) or a combination of single and double stranded (for example with a mismatched sequence, hairpin or other structure), an antisense RNA, complementary RNA, inhibitory RNA, interfering RNA, nuclear RNA, antisense oligonucleotide (ASO), microRNA (miRNA), complementary oligonucleotide to natural antisense transcripts (NATs) sequences, siRNA, snRNA, gapmer, anti-miR, splice blocker ASO, or U1 Adapter. The gene may be targeted for downregulation to improve a disease condition. Short overlapping sequences (e.g., 12, 15, 20, 21, 25, or 30 nt in length) complementary to the gene, walking along up to the entire length of the gene, are generated and tested to determine which provides the most effective regulation. The sequence may be chosen to contain 3 or more mismatches to other sequences in the transcriptome. The sequence may be chosen to avoid any that have 14 or more matches with a nontarget or undesired complementary sequence. The sequence may be chosen to avoid the most common seed regions of 2-8 nts on the 5′ end of siRNA. Chemical modifications to the oligonucleotide are also tested (concurrently or after sequence testing). Chemical modifications may include modifications on the termini of the oligonucleotides to reduce exonuclease cleavage, such as by placing 1-3 phosphorothioate linkages on all ends. Chemical modifications may include 2′F bases such as 2′F pyrimidine bases for increased stabilization and binding. Chemical modifications may also include 2′-OMe or 2′-Omethoxyethyl bases to decrease immune activation, including to offset that which may be increased by the including of 2′F bases. Chemical modifications may also include using BNA or LNA or any other modification of this disclosure. Optionally, the oligonucleotides are tested in pool, such as 5-10 sequences at once, to narrow down to the best sequences. Optionally, the sequences are also tested for immune activation, such as with an IFIT (Interferon-induced proteins with tetratricopeptide repeats) or T cell activation assay or innate immune activation assay such as qRT-PCR, immune cell activation or proliferation or cytokine secretion, and the sequences with lower immune activation are prioritized. Optionally, nontarget AA/TT sequences are added on the ends of the siRNA. Optionally, sequence overhangs are added on the ends of the siRNA. The oligonucleotide sequences may be selected for homology to both human and other species (such as mouse, rat, and non-human primate). Alternatively, a different oligonucleotide sequence to the same target may be used in other species for preclinical development (e.g., mouse or rat) than the oligonucleotide sequence complementary to the human target which is used for clinical development and to treat human patients. Optionally, an siRNA sequence is designed using the methods of. Fakhr et al. Precise and efficient siRNA design: a key point in competent gene silencing Cancer Gene Therapy. 2016; 23, 73-82.

[0536] The oligonucleotide or the peptide oligonucleotide complex is tested for its ability to reduce the level of intact functional RNA or to reduce the level of protein which is encoded by the targeted RNA. The oligonucleotide or the peptide oligonucleotide complex is tested for its ability to generate the desired phenotypic response in the cells, tissue, or animals, such as reduced tumor growth rate, reduced cognitive decline, or reduced inflammation. The oligonucleotide or peptide oligonucleotide complex is also tested for safety or undesirable side effects. The testing is performed in vitro, in vivo, or in humans. The oligonucleotide or the peptide oligonucleotide complex with the most desired attributes is selected.

### Example 43

### Design of an Oligonucleotide Sequence for a Peptide Oligonucleotide Complex

[0537] A target gene for making target binding agent capable of binding a target molecule is selected based on the association between its expression and disease; this could be direct (e.g. either the transcript itself or a protein encoded by the transcript is associated with or leads to disease phenotype) or indirect (e.g. either the transcript itself or a protein encoded by that transcript modifies a different gene or transcript or protein whose activity is associated with or leads to disease phenotype). The target sequence is derived from the gene's open reading frame. The target sequence may be found in the coding region or in the non-coding region, and it may be found in the mature mRNA (which has been spliced, polyadenylated, capped, and exported to the cytosol for translation) or in the immature pre-mRNA. The target binding agent will be the complement to such open reading frame. If the target sequence is found in the mature mRNA (for example, when planning to use siRNA), then the search for appropriate sequences will begin with identification of the appropriate transcript isoform, taking into consideration such variables as alternative splicing or alternative transcription start sites. If the target sequence is found in the immature pre-mRNA (for example, when planning to use gapmers, splice-blocking oligonucleotides, or U1 adapters), then the search for appropriate sequences will begin with identification of the full open reading frame of the gene in question, taking into consideration such variables as alternative transcription start sites but with less consideration for alternative splice isoforms. If the target is an antisense sequence (e.g., miRNA to be targeted by an anti-miR), the sequence would be based on the mature guide strand sequence. These reference sequences can be found in public genome databases, including but not limited to the National Center for Biotechnology Information (NCBI) or the University of California Santa Cruz (UCSC) Genome Browser. The pre-mRNA sequence is the same as the genomic sequence. Optionally the reference sequences are as given in TABLE 17.

TABLE 17
Examples of Open Reading Frame Reference Sequences

| | Exemplary | NCBI Refseq | |
|---|---|---|---|
| Target | Approach | Gene | NCBI Refseq RNA(s) |
| CBP | siRNA | NG_009873.2 | NM_001079846.1, |
| (gene CREBP) | | | NM_004380.3 |
| p300 | Gapmer | NG_009817.1 | NM_001429.4, |
| (gene EP300) | | | NM_001362843.2 |
| miR-21 | Anti-miR | | NR_029493.1 (NCBI) |
| (gene MIR21) | | | MIMAT0000076 |
| | | | (miRBase) |
| BCL2 | U1 adapter | NG_009361.1 | NM_000633.3, |
| (gene BCL2) | | | NM_000657.3 |

[0538] While preferred embodiments of the present invention have been shown and described herein, it will be apparent to those skilled in the art that such embodiments are provided by way of example only. Numerous variations, changes, and substitutions will now occur to those skilled in the art without departing from the invention. It should be understood that various alternatives to the embodiments of the invention described herein may be employed in practicing the invention. It is intended that the following claims define the scope of the invention and that methods and structures within the scope of these claims and their equivalents be covered thereby.

1-214. (canceled)

215. A PD-L1-binding peptide comprising a first PD-L1-binding motif comprising a sequence of:
(a) X¹X²X³X⁴X⁵X⁶CX⁷X⁸X⁹C (SEQ ID NO: 361), wherein X¹ is D, E, H, K, N, Q, S, T, L, V, F, Y, or P; X² is G, E, Q, or F; X³ is D or K; X⁴ is G, V, or P; X⁵ is G, H, R, V, F, W, or P; X⁶ is A, D, or K; X⁷ is E, H, Q, L, or F; X⁸ is D, E, R, S, T, M, L, or F; and X⁹ is G, A, D, E, H, K, R, M, L, or P; or
(b) X¹FX²VFX²CLX³X³C (SEQ ID NO: 363), wherein X¹ is K or P; X² is independently D or K; and X³ is independently any non-cysteine amino acid.

216. The PD-L1-binding peptide of claim 215, comprising at least six cysteine residues.

217. The PD-L1-binding peptide of claim 216, wherein the at least six cysteine residues are located at amino acid positions n, n+4, n+14, n+28, n+38, and n+42, wherein n corresponds to a position of a first cysteine residue of the at least six cysteine residues.

218. The PD-L1-binding peptide of claim 215, wherein amino acid position n corresponds to amino acid position 4, such that at least six cysteine residues are located at amino acid positions 4, 8, 18, 32, 42, and 46.

219. The PD-L1-binding peptide of claim 215, wherein the first PD-L1-binding motif comprising a sequence of X¹X²X³X⁴X⁵X⁶CX⁷X⁸X⁹C (SEQ ID NO: 361), wherein X¹ is D, E, H, K, N, Q, S, T, L, V, F, Y, or P; X² is G, E, Q, or F; X³ is D or K; X⁴ is G, V, or P; X⁵ is G, H, R, V, F, W, or P; X⁶ is A, D, or K; X⁷ is E, H, Q, L, or F; X⁸ is D, E, R, S, T, M, L, or F; and X⁹ is G, A, D, E, H, K, R, M, L, or P.

220. The PD-L1-binding peptide of claim 215, wherein the first PD-L1-binding motif comprises a sequence of KFDVFKCLDHC (SEQ ID NO: 365).

221. The PD-L1-binding peptide of claim 215, further comprising a second PD-L1-binding motif comprising a sequence of CX¹X²X³CX⁴X⁵X⁶X⁷X⁸X⁹X¹⁰X¹¹X¹²C (SEQ ID NO: 360), wherein X¹ is K, R, or V; X² is E, Q, S, M, L, or V; X³ is D, E, H, K, R, N, Q, S, or Y; X⁴ is D, M, or V; X⁵ is A, K, R, Q, S, or T; X⁶ is A, D, E, H, Q, S, T, M, I, L, V, or W; X⁷ is A, E, R, Q, S, T, W, or P; X⁸ is A, E, K, R, N, Q, T, M, I, L, V, or W; X⁹ is G, A, E, K, N, T, or Y; X¹⁰ is G, A, D, E, H, K, R, N, Q, S, T, M, I, L, V, W, Y, or P; X¹¹ is D, K, R, N, L, or V; and X¹² is G, A, D, T, L, W, or P.

222. The PD-L1-binding peptide of claim 221, wherein the second PD-L1-binding motif comprises a sequence of CKVHCVKEWMAGKAC (SEQ ID NO: 364).

223. The PD-L1-binding peptide of claim 215, wherein the PD-L1-binding peptide comprises a sequence of SEQ ID NO: 358.

224. The PD-L1-binding peptide of claim 215, wherein the PD-L1-binding peptide comprises a sequence having at least 80% sequence identity to any one of SEQ ID NO: 1-SEQ ID NO: 4 or SEQ ID NO: 554.

225. The PD-L1-binding peptide of claim 215, wherein the PD-L1-binding peptide comprises a sequence of any one of SEQ ID NO: 1-SEQ ID NO: 4 or SEQ ID NO: 554.

The application's sequence listing, which the Patent Office published only in electronic form, follows.

SEQUENCE LISTING (567 sequences)

SEQ ID NO: 1 - protein, 49 aa, Artificial Sequence
  Description of Artificial Sequence: Synthetic polypeptide
EEDCKVHCVKEWMAGKACAERQKSYTIGRAHCSGQKFDVFKCLDHCAAP

SEQ ID NO: 2 - protein, 49 aa, Artificial Sequence
  Description of Artificial Sequence: Synthetic polypeptide
EEDCKVHCVKEWMAGKACAERDKSYTIGRAHCSGQKFDVFKCLDHCAAP

SEQ ID NO: 3 - protein, 49 aa, Artificial Sequence
  Description of Artificial Sequence: Synthetic polypeptide
EEDCKVHCVKEWMAGKACAERNKSYTIGRAHCSGQKFDVFKCLDHCAAP

SEQ ID NO: 4 - protein, 49 aa, Artificial Sequence
  Description of Artificial Sequence: Synthetic polypeptide
EEDCKVHCVKEWAAYKACAERIKSYTIGRAHCSGQYFDVWKCLDHCAAP

SEQ ID NO: 5 - protein, 48 aa, Artificial Sequence
  Description of Artificial Sequence: Synthetic polypeptide
ARTCESQSHRFKGPCVSMTNCASVCRTERFSGGHCRGFRRRCLCTKHC

SEQ ID NO: 6 - protein, 48 aa, Artificial Sequence
  Description of Artificial Sequence: Synthetic polypeptide
ARTCESQSHRFKGPCVSDTNCASVCYTERFSGGHCRGFRRRCLCTKHC

SEQ ID NO: 7 - protein, 48 aa, Artificial Sequence
  Description of Artificial Sequence: Synthetic polypeptide
ARTCESQSHRFKGPCVSDTNCASVCRTERFSGGHCMGFRRRCLCTKHC

SEQ ID NO: 8 - protein, 49 aa, Artificial Sequence
  Description of Artificial Sequence: Synthetic polypeptide
EEDCKVHCVKWWMAGKACAERNKSYTIGRAHCSGQKFDVFKCLDHCAAP

SEQ ID NO: 9 - protein, 49 aa, Artificial Sequence; identical to SEQ ID NO: 3
  Description of Artificial Sequence: Synthetic polypeptide

SEQ ID NO: 10 - protein, 49 aa, Artificial Sequence
  Description of Artificial Sequence: Synthetic polypeptide
EEDCKVHCVKWWAAGKACAERNKSYTIGRAHCSGQKFDVFKCLDHCAAP

SEQ ID NO: 11 - protein, 49 aa, Artificial Sequence
  Description of Artificial Sequence: Synthetic polypeptide
EEDCKVHCVKWWMAYKACAERNKSYTIGRAHCSGQKFDVFKCLDHCAAP

SEQ ID NO: 12 - protein, 49 aa, Artificial Sequence
  Description of Artificial Sequence: Synthetic polypeptide
EEDCKVHCVKWWMAGKACAERIKSYTIGRAHCSGQKFDVFKCLDHCAAP

SEQ ID NO: 13 - protein, 49 aa, Artificial Sequence
  Description of Artificial Sequence: Synthetic polypeptide
EEDCKVHCVKWWMAGKACAERNKSYTIGRAHCSGQYFDVFKCLDHCAAP

SEQ ID NO: 14 - protein, 49 aa, Artificial Sequence
  Description of Artificial Sequence: Synthetic polypeptide
EEDCKVHCVKWWMAGKACAERNKSYTIGRAHCSGQKFDVWKCLDHCAAP

SEQ ID NO: 15 - protein, 49 aa, Artificial Sequence
  Description of Artificial Sequence: Synthetic polypeptide
EEDCKVHCVKWWAAYKACAERIKSYTIGRAHCSGQYFDVWKCLDHCAAP

SEQ ID NO: 16 - protein, 49 aa, Artificial Sequence
  Description of Artificial Sequence: Synthetic polypeptide
EEDCKVHCVKEWMAYKACAERIKSYTIGRAHCSGQYFDVWKCLDHCAAP

SEQ ID NO: 17 - protein, 49 aa, Artificial Sequence
  Description of Artificial Sequence: Synthetic polypeptide
EEDCKVHCVKEWAAGKACAERIKSYTIGRAHCSGQYFDVWKCLDHCAAP

SEQ ID NO: 18 - protein, 49 aa, Artificial Sequence
  Description of Artificial Sequence: Synthetic polypeptide
EEDCKVHCVKEWAAYKACAERNKSYTIGRAHCSGQYFDVWKCLDHCAAP

SEQ ID NO: 19 - protein, 49 aa, Artificial Sequence
  Description of Artificial Sequence: Synthetic polypeptide
EEDCKVHCVKEWAAYKACAERIKSYTIGRAHCSGQKFDVWKCLDHCAAP

SEQ ID NO: 20 - protein, 49 aa, Artificial Sequence
  Description of Artificial Sequence: Synthetic polypeptide
EEDCKVHCVKEWAAYKACAERIKSYTIGRAHCSGQYFDVFKCLDHCAAP

SEQ ID NO: 21 - protein, 49 aa, Artificial Sequence
  Description of Artificial Sequence: Synthetic polypeptide
EEDCKVHCVKEWMAGKACAERIKSYTIGRAHCSGQYFDVWKCLDHCAAP

SEQ ID NO: 22 - protein, 49 aa, Artificial Sequence
  Description of Artificial Sequence: Synthetic polypeptide
EEDCKVHCVKEWMAYKACAERNKSYTIGRAHCSGQYFDVWKCLDHCAAP

SEQ ID NO: 23 - protein, 49 aa, Artificial Sequence
  Description of Artificial Sequence: Synthetic polypeptide
EEDCKVHCVKEWMAYKACAERIKSYTIGRAHCSGQKFDVWKCLDHCAAP

SEQ ID NO: 24 - protein, 49 aa, Artificial Sequence
  Description of Artificial Sequence: Synthetic polypeptide
EEDCKVHCVKEWMAYKACAERIKSYTIGRAHCSGQYFDVFKCLDHCAAP

SEQ ID NO: 25 - protein, 49 aa, Artificial Sequence
  Description of Artificial Sequence: Synthetic polypeptide
EEDCKVHCVKEWAAGKACAERNKSYTIGRAHCSGQYFDVWKCLDHCAAP

SEQ ID NO: 26 - protein, 49 aa, Artificial Sequence
  Description of Artificial Sequence: Synthetic polypeptide
EEDCKVHCVKEWAAGKACAERIKSYTIGRAHCSGQKFDVWKCLDHCAAP

SEQ ID NO: 27 - protein, 49 aa, Artificial Sequence
  Description of Artificial Sequence: Synthetic polypeptide
EEDCKVHCVKEWAAGKACAERIKSYTIGRAHCSGQYFDVFKCLDHCAAP

SEQ ID NO: 28 - protein, 49 aa, Artificial Sequence
  Description of Artificial Sequence: Synthetic polypeptide
EEDCKVHCVKEWAAYKACAERNKSYTIGRAHCSGQKFDVWKCLDHCAAP

SEQ ID NO: 29 - protein, 49 aa, Artificial Sequence
  Description of Artificial Sequence: Synthetic polypeptide
EEDCKVHCVKEWAAYKACAERNKSYTIGRAHCSGQYFDVFKCLDHCAAP

SEQ ID NO: 30 - protein, 49 aa, Artificial Sequence
  Description of Artificial Sequence: Synthetic polypeptide
EEDCKVHCVKEWAAYKACAERIKSYTIGRAHCSGQKFDVFKCLDHCAAP

SEQ ID NO: 31 - protein, 49 aa, Artificial Sequence
  Description of Artificial Sequence: Synthetic polypeptide
EEDCKVHCVKEWMAGKACAERQKSDTTGQAHCSGQKFDVFKCLDHCAAP

SEQ ID NO: 32 - protein, 49 aa, Artificial Sequence
  Description of Artificial Sequence: Synthetic polypeptide
EEDCKVHCVKEWMAGKACAERNKSDTTGQAHCSGQKFDVFKCLDHCAAP

SEQ ID NO: 33 - protein, 49 aa, Artificial Sequence
  Description of Artificial Sequence: Synthetic polypeptide
EEDCKVHCVKEWAAYKACAERIKSDTTGQAHCSGQYFDVWKCLDHCAAP

SEQ ID NO: 34 - protein, 49 aa, Artificial Sequence
  Description of Artificial Sequence: Synthetic polypeptide
EEDCKVHCVKWWMAGKACAERNKSDTTGQAHCSGQKFDVFKCLDHCAAP

SEQ ID NO: 35 - protein, 49 aa, Artificial Sequence; identical to SEQ ID NO: 32
  Description of Artificial Sequence: Synthetic polypeptide

SEQ ID NO: 36 - protein, 49 aa, Artificial Sequence
  Description of Artificial Sequence: Synthetic polypeptide
EEDCKVHCVKWWAAGKACAERNKSDTTGQAHCSGQKFDVFKCLDHCAAP

SEQ ID NO: 37 - protein, 49 aa, Artificial Sequence
  Description of Artificial Sequence: Synthetic polypeptide
EEDCKVHCVKWWMAYKACAERNKSDTTGQAHCSGQKFDVFKCLDHCAAP

SEQ ID NO: 38 - protein, 49 aa, Artificial Sequence
  Description of Artificial Sequence: Synthetic polypeptide
EEDCKVHCVKWWMAGKACAERIKSDTTGQAHCSGQKFDVFKCLDHCAAP

SEQ ID NO: 39 - protein, 49 aa, Artificial Sequence
  Description of Artificial Sequence: Synthetic polypeptide
EEDCKVHCVKWWMAGKACAERNKSDTTGQAHCSGQYFDVFKCLDHCAAP

SEQ ID NO: 40 - protein, 49 aa, Artificial Sequence
  Description of Artificial Sequence: Synthetic polypeptide
EEDCKVHCVKWWMAGKACAERNKSDTTGQAHCSGQKFDVWKCLDHCAAP

SEQ ID NO: 41 - protein, 49 aa, Artificial Sequence
  Description of Artificial Sequence: Synthetic polypeptide
EEDCKVHCVKWWAAYKACAERIKSDTTGQAHCSGQYFDVWKCLDHCAAP

SEQ ID NO: 42 - protein, 49 aa, Artificial Sequence
  Description of Artificial Sequence: Synthetic polypeptide
EEDCKVHCVKEWMAYKACAERIKSDTTGQAHCSGQYFDVWKCLDHCAAP

SEQ ID NO: 43 - protein, 49 aa, Artificial Sequence
  Description of Artificial Sequence: Synthetic polypeptide
EEDCKVHCVKEWAAGKACAERIKSDTTGQAHCSGQYFDVWKCLDHCAAP

SEQ ID NO: 44 - protein, 49 aa, Artificial Sequence
  Description of Artificial Sequence: Synthetic polypeptide
EEDCKVHCVKEWAAYKACAERNKSDTTGQAHCSGQYFDVWKCLDHCAAP

SEQ ID NO: 45 - protein, 49 aa, Artificial Sequence
  Description of Artificial Sequence: Synthetic polypeptide
EEDCKVHCVKEWAAYKACAERIKSDTTGQAHCSGQKFDVWKCLDHCAAP

SEQ ID NO: 46 - protein, 49 aa, Artificial Sequence
  Description of Artificial Sequence: Synthetic polypeptide
EEDCKVHCVKEWAAYKACAERIKSDTTGQAHCSGQYFDVFKCLDHCAAP

SEQ ID NO: 47 - protein, 49 aa, Artificial Sequence
  Description of Artificial Sequence: Synthetic polypeptide
EEDCKVHCVKEWMAGKACAERIKSDTTGQAHCSGQYFDVWKCLDHCAAP

SEQ ID NO: 48 - protein, 49 aa, Artificial Sequence
  Description of Artificial Sequence: Synthetic polypeptide
EEDCKVHCVKEWMAYKACAERNKSDTTGQAHCSGQYFDVWKCLDHCAAP

SEQ ID NO: 49 - protein, 49 aa, Artificial Sequence
  Description of Artificial Sequence: Synthetic polypeptide
EEDCKVHCVKEWMAYKACAERIKSDTTGQAHCSGQKFDVWKCLDHCAAP

SEQ ID NO: 50 - protein, 49 aa, Artificial Sequence
  Description of Artificial Sequence: Synthetic polypeptide
EEDCKVHCVKEWMAYKACAERIKSDTTGQAHCSGQYFDVFKCLDHCAAP

SEQ ID NO: 51 - protein, 49 aa, Artificial Sequence
  Description of Artificial Sequence: Synthetic polypeptide
EEDCKVHCVKEWAAGKACAERNKSDTTGQAHCSGQYFDVWKCLDHCAAP

SEQ ID NO: 52 - protein, 49 aa, Artificial Sequence
  Description of Artificial Sequence: Synthetic polypeptide
EEDCKVHCVKEWAAGKACAERIKSDTTGQAHCSGQKFDVWKCLDHCAAP

SEQ ID NO: 53 - protein, 49 aa, Artificial Sequence
  Description of Artificial Sequence: Synthetic polypeptide
EEDCKVHCVKEWAAGKACAERIKSDTTGQAHCSGQYFDVFKCLDHCAAP

SEQ ID NO: 54 - protein, 49 aa, Artificial Sequence
  Description of Artificial Sequence: Synthetic polypeptide
EEDCKVHCVKEWAAYKACAERNKSDTTGQAHCSGQKFDVWKCLDHCAAP

SEQ ID NO: 55 - protein, 49 aa, Artificial Sequence
  Description of Artificial Sequence: Synthetic polypeptide
EEDCKVHCVKEWAAYKACAERNKSDTTGQAHCSGQYFDVFKCLDHCAAP

SEQ ID NO: 56 - protein, 49 aa, Artificial Sequence
  Description of Artificial Sequence: Synthetic polypeptide
EEDCKVHCVKEWAAYKACAERIKSDTTGQAHCSGQKFDVFKCLDHCAAP

SEQ ID NO: 57 - protein, 49 aa, Artificial Sequence
  Description of Artificial Sequence: Synthetic polypeptide
EESCKPQCVKAWLEYQACAERVEKDESGEAHCTGQYFDLWGCVDKCVAP

SEQ ID NO: 58 - protein, 48 aa, Artificial Sequence
  Description of Artificial Sequence: Synthetic polypeptide
ARTCESQSHRFKGPCVSDTMCASVCRTERFSGGHCRGFRRRCLCSKHC

SEQ ID NO: 59 - protein, 49 aa, Artificial Sequence
  Description of Artificial Sequence: Synthetic polypeptide
EERCMPQCVKSLYEYEKCLKRVENDDTGHKHCTGHYFDYWSCIDKCVAS

SEQ ID NO: 60 - protein, 51 aa, Artificial Sequence
  Description of Artificial Sequence: Synthetic polypeptide
GSEEDCKVHCVKEWMAGKACAERQKSYTIGRAHCSGQKFDVFKCLDHCAAP

SEQ ID NO: 61 - protein, 51 aa, Artificial Sequence
  Description of Artificial Sequence: Synthetic polypeptide
GSEEDCKVHCVKEWMAGKACAERDKSYTIGRAHCSGQKFDVFKCLDHCAAP

SEQ ID NO: 62 - protein, 51 aa, Artificial Sequence
  Description of Artificial Sequence: Synthetic polypeptide
GSEEDCKVHCVKEWMAGKACAERNKSYTIGRAHCSGQKFDVFKCLDHCAAP

SEQ ID NO: 63 - protein, 51 aa, Artificial Sequence
  Description of Artificial Sequence: Synthetic polypeptide
GSEEDCKVHCVKEWAAYKACAERIKSYTIGRAHCSGQYFDVWKCLDHCAAP

SEQ ID NO: 64 - protein, 50 aa, Artificial Sequence
  Description of Artificial Sequence: Synthetic polypeptide
GSARTCESQSHRFKGPCVSMTNCASVCRTERFSGGHCRGFRRRCLCTKHC

SEQ ID NO: 65 - protein, 50 aa, Artificial Sequence
  Description of Artificial Sequence: Synthetic polypeptide
GSARTCESQSHRFKGPCVSDTNCASVCYTERFSGGHCRGFRRRCLCTKHC

SEQ ID NO: 66 - protein, 50 aa, Artificial Sequence
  Description of Artificial Sequence: Synthetic polypeptide
GSARTCESQSHRFKGPCVSDTNCASVCRTERFSGGHCMGFRRRCLCTKHC

SEQ ID NO: 67 - protein, 51 aa, Artificial Sequence
  Description of Artificial Sequence: Synthetic polypeptide
GSEEDCKVHCVKWWMAGKACAERNKSYTIGRAHCSGQKFDVFKCLDHCAAP

SEQ ID NO: 68 - protein, 51 aa, Artificial Sequence; identical to SEQ ID NO: 62
  Description of Artificial Sequence: Synthetic polypeptide

SEQ ID NO: 69 - protein, 51 aa, Artificial Sequence
  Description of Artificial Sequence: Synthetic polypeptide
GSEEDCKVHCVKWWAAGKACAERNKSYTIGRAHCSGQKFDVFKCLDHCAAP

SEQ ID NO: 70 - protein, 51 aa, Artificial Sequence
  Description of Artificial Sequence: Synthetic polypeptide
GSEEDCKVHCVKWWMAYKACAERNKSYTIGRAHCSGQKFDVFKCLDHCAAP

SEQ ID NO: 71 - protein, 51 aa, Artificial Sequence
  Description of Artificial Sequence: Synthetic polypeptide
GSEEDCKVHCVKWWMAGKACAERIKSYTIGRAHCSGQKFDVFKCLDHCAAP

SEQ ID NO: 72 - protein, 51 aa, Artificial Sequence
  Description of Artificial Sequence: Synthetic polypeptide
GSEEDCKVHCVKWWMAGKACAERNKSYTIGRAHCSGQYFDVFKCLDHCAAP

SEQ ID NO: 73 - protein, 51 aa, Artificial Sequence
  Description of Artificial Sequence: Synthetic polypeptide
GSEEDCKVHCVKWWMAGKACAERNKSYTIGRAHCSGQKFDVWKCLDHCAAP

SEQ ID NO: 74 - protein, 51 aa, Artificial Sequence
  Description of Artificial Sequence: Synthetic polypeptide
GSEEDCKVHCVKWWAAYKACAERIKSYTIGRAHCSGQYFDVWKCLDHCAAP

SEQ ID NO: 75 - protein, 51 aa, Artificial Sequence
  Description of Artificial Sequence: Synthetic polypeptide
GSEEDCKVHCVKEWMAYKACAERIKSYTIGRAHCSGQYFDVWKCLDHCAAP

SEQ ID NO: 76 - protein, 51 aa, Artificial Sequence
  Description of Artificial Sequence: Synthetic polypeptide
GSEEDCKVHCVKEWAAGKACAERIKSYTIGRAHCSGQYFDVWKCLDHCAAP

SEQ ID NO: 77 - protein, 51 aa, Artificial Sequence
  Description of Artificial Sequence: Synthetic polypeptide
GSEEDCKVHCVKEWAAYKACAERNKSYTIGRAHCSGQYFDVWKCLDHCAAP

SEQ ID NO: 78 - protein, 51 aa, Artificial Sequence
  Description of Artificial Sequence: Synthetic polypeptide
GSEEDCKVHCVKEWAAYKACAERIKSYTIGRAHCSGQKFDVWKCLDHCAAP

SEQ ID NO: 79 - protein, 51 aa, Artificial Sequence
  Description of Artificial Sequence: Synthetic polypeptide
GSEEDCKVHCVKEWAAYKACAERIKSYTIGRAHCSGQYFDVFKCLDHCAAP

SEQ ID NO: 80 - protein, 51 aa, Artificial Sequence
  Description of Artificial Sequence: Synthetic polypeptide
GSEEDCKVHCVKEWMAGKACAERIKSYTIGRAHCSGQYFDVWKCLDHCAAP

SEQ ID NO: 81 - protein, 51 aa, Artificial Sequence
  Description of Artificial Sequence: Synthetic polypeptide
GSEEDCKVHCVKEWMAYKACAERNKSYTIGRAHCSGQYFDVWKCLDHCAAP

SEQ ID NO: 82 - protein, 51 aa, Artificial Sequence
  Description of Artificial Sequence: Synthetic polypeptide
GSEEDCKVHCVKEWMAYKACAERIKSYTIGRAHCSGQKFDVWKCLDHCAAP

SEQ ID NO: 83 - protein, 51 aa, Artificial Sequence
  Description of Artificial Sequence: Synthetic polypeptide
GSEEDCKVHCVKEWMAYKACAERIKSYTIGRAHCSGQYFDVFKCLDHCAAP

SEQ ID NO: 84 - protein, 51 aa, Artificial Sequence
  Description of Artificial Sequence: Synthetic polypeptide
GSEEDCKVHCVKEWAAGKACAERNKSYTIGRAHCSGQYFDVWKCLDHCAAP

SEQ ID NO: 85 - protein, 51 aa, Artificial Sequence
  Description of Artificial Sequence: Synthetic polypeptide
GSEEDCKVHCVKEWAAGKACAERIKSYTIGRAHCSGQKFDVWKCLDHCAAP

SEQ ID NO: 86 - protein, 51 aa, Artificial Sequence
  Description of Artificial Sequence: Synthetic polypeptide
GSEEDCKVHCVKEWAAGKACAERIKSYTIGRAHCSGQYFDVFKCLDHCAAP

SEQ ID NO: 87 - protein, 51 aa, Artificial Sequence
  Description of Artificial Sequence: Synthetic polypeptide
GSEEDCKVHCVKEWAAYKACAERNKSYTIGRAHCSGQKFDVWKCLDHCAAP

SEQ ID NO: 88 - protein, 51 aa, Artificial Sequence
  Description of Artificial Sequence: Synthetic polypeptide
GSEEDCKVHCVKEWAAYKACAERNKSYTIGRAHCSGQYFDVFKCLDHCAAP

SEQ ID NO: 89 - protein, 51 aa, Artificial Sequence
  Description of Artificial Sequence: Synthetic polypeptide
GSEEDCKVHCVKEWAAYKACAERIKSYTIGRAHCSGQKFDVFKCLDHCAAP

SEQ ID NO: 90 - protein, 51 aa, Artificial Sequence
  Description of Artificial Sequence: Synthetic polypeptide
GSEEDCKVHCVKEWMAGKACAERQKSDTTGQAHCSGQKFDVFKCLDHCAAP

SEQ ID NO: 91 - protein, 51 aa, Artificial Sequence
  Description of Artificial Sequence: Synthetic polypeptide
GSEEDCKVHCVKEWMAGKACAERNKSDTTGQAHCSGQKFDVFKCLDHCAAP

SEQ ID NO: 92 - protein, 51 aa, Artificial Sequence
  Description of Artificial Sequence: Synthetic polypeptide
GSEEDCKVHCVKEWAAYKACAERIKSDTTGQAHCSGQYFDVWKCLDHCAAP

SEQ ID NO: 93 - protein, 51 aa, Artificial Sequence
  Description of Artificial Sequence: Synthetic polypeptide
GSEEDCKVHCVKWWMAGKACAERNKSDTTGQAHCSGQKFDVFKCLDHCAAP

SEQ ID NO: 94 - protein, 51 aa, Artificial Sequence; identical to SEQ ID NO: 91
  Description of Artificial Sequence: Synthetic polypeptide

SEQ ID NO: 95 - protein, 51 aa, Artificial Sequence
  Description of Artificial Sequence: Synthetic polypeptide
GSEEDCKVHCVKWWAAGKACAERNKSDTTGQAHCSGQKFDVFKCLDHCAAP

SEQ ID NO: 96 - protein, 51 aa, Artificial Sequence
  Description of Artificial Sequence: Synthetic polypeptide
GSEEDCKVHCVKWWMAYKACAERNKSDTTGQAHCSGQKFDVFKCLDHCAAP

SEQ ID NO: 97 - protein, 51 aa, Artificial Sequence
  Description of Artificial Sequence: Synthetic polypeptide
GSEEDCKVHCVKWWMAGKACAERIKSDTTGQAHCSGQKFDVFKCLDHCAAP

SEQ ID NO: 98 - protein, 51 aa, Artificial Sequence
  Description of Artificial Sequence: Synthetic polypeptide
GSEEDCKVHCVKWWMAGKACAERNKSDTTGQAHCSGQYFDVFKCLDHCAAP

SEQ ID NO: 99 - protein, 51 aa, Artificial Sequence
  Description of Artificial Sequence: Synthetic polypeptide
GSEEDCKVHCVKWWMAGKACAERNKSDTTGQAHCSGQKFDVWKCLDHCAAP

SEQ ID NO: 100 - protein, 51 aa, Artificial Sequence
  Description of Artificial Sequence: Synthetic polypeptide
GSEEDCKVHCVKWWAAYKACAERIKSDTTGQAHCSGQYFDVWKCLDHCAAP

SEQ ID NO: 101 - protein, 51 aa, Artificial Sequence
  Description of Artificial Sequence: Synthetic polypeptide
GSEEDCKVHCVKEWMAYKACAERIKSDTTGQAHCSGQYFDVWKCLDHCAAP

SEQ ID NO: 102 - protein, 51 aa, Artificial Sequence
  Description of Artificial Sequence: Synthetic polypeptide
GSEEDCKVHCVKEWAAGKACAERIKSDTTGQAHCSGQYFDVWKCLDHCAAP

SEQ ID NO: 103 - protein, 51 aa, Artificial Sequence
  Description of Artificial Sequence: Synthetic polypeptide
GSEEDCKVHCVKEWAAYKACAERNKSDTTGQAHCSGQYFDVWKCLDHCAAP

SEQ ID NO: 104 - protein, 51 aa, Artificial Sequence
  Description of Artificial Sequence: Synthetic polypeptide
GSEEDCKVHCVKEWAAYKACAERIKSDTTGQAHCSGQKFDVWKCLDHCAAP

SEQ ID NO: 105 - protein, 51 aa, Artificial Sequence
  Description of Artificial Sequence: Synthetic polypeptide
GSEEDCKVHCVKEWAAYKACAERIKSDTTGQAHCSGQYFDVFKCLDHCAAP

SEQ ID NO: 106 - protein, 51 aa, Artificial Sequence
  Description of Artificial Sequence: Synthetic polypeptide
GSEEDCKVHCVKEWMAGKACAERIKSDTTGQAHCSGQYFDVWKCLDHCAAP

SEQ ID NO: 107 - protein, 51 aa, Artificial Sequence
  Description of Artificial Sequence: Synthetic polypeptide
GSEEDCKVHCVKEWMAYKACAERNKSDTTGQAHCSGQYFDVWKCLDHCAAP

SEQ ID NO: 108 - protein, 51 aa, Artificial Sequence
  Description of Artificial Sequence: Synthetic polypeptide
GSEEDCKVHCVKEWMAYKACAERIKSDTTGQAHCSGQKFDVWKCLDHCAAP

SEQ ID NO: 109 - protein, 51 aa, Artificial Sequence
  Description of Artificial Sequence: Synthetic polypeptide
GSEEDCKVHCVKEWMAYKACAERIKSDTTGQAHCSGQYFDVFKCLDHCAAP

SEQ ID NO: 110 - protein, 51 aa, Artificial Sequence
  Description of Artificial Sequence: Synthetic polypeptide
GSEEDCKVHCVKEWAAGKACAERNKSDTTGQAHCSGQYFDVWKCLDHCAAP

SEQ ID NO: 111 - protein, 51 aa, Artificial Sequence
  Description of Artificial Sequence: Synthetic polypeptide
GSEEDCKVHCVKEWAAGKACAERIKSDTTGQAHCSGQKFDVWKCLDHCAAP

SEQ ID NO: 112 - protein, 51 aa, Artificial Sequence
  Description of Artificial Sequence: Synthetic polypeptide
GSEEDCKVHCVKEWAAGKACAERIKSDTTGQAHCSGQYFDVFKCLDHCAAP

SEQ ID NO: 113 - protein, 51 aa, Artificial Sequence
  Description of Artificial Sequence: Synthetic polypeptide
GSEEDCKVHCVKEWAAYKACAERNKSDTTGQAHCSGQKFDVWKCLDHCAAP

SEQ ID NO: 114 - protein, 51 aa, Artificial Sequence
  Description of Artificial Sequence: Synthetic polypeptide
GSEEDCKVHCVKEWAAYKACAERNKSDTTGQAHCSGQYFDVFKCLDHCAAP

SEQ ID NO: 115 - protein, 51 aa, Artificial Sequence
  Description of Artificial Sequence: Synthetic polypeptide
GSEEDCKVHCVKEWAAYKACAERIKSDTTGQAHCSGQKFDVFKCLDHCAAP

SEQ ID NO: 116 - protein, 51 aa, Artificial Sequence
  Description of Artificial Sequence: Synthetic polypeptide
GSEESCKPQCVKAWLEYQACAERVEKDESGEAHCTGQYFDLWGCVDKCVAP

SEQ ID NO: 117 - protein, 50 aa, Artificial Sequence
  Description of Artificial Sequence: Synthetic polypeptide
GSARTCESQSHRFKGPCVSDTMCASVCRTERFSGGHCRGFRRRCLCSKHC

SEQ ID NO: 118 - protein, 51 aa, Artificial Sequence
  Description of Artificial Sequence: Synthetic polypeptide
GSEERCMPQCVKSLYEYEKCLKRVENDDTGHKHCTGHYFDYWSCIDKCVAS

SEQ ID NO: 119 - protein, 296 aa, Artificial Sequence
  Description of Artificial Sequence: Synthetic polypeptide
EEDCKVHCVKEWMAGKACAERDKSYTIGRAHCSGQKFDVFKCLDHCAAPGGGGSGGGGSGGGGSEPKSSDKTHTCPPCPAPELLGGPSVFLFPPKPKDTLMISRTPEVTCVVVDVSHEDPEVKFNWYVDGVEVHNAKTKPREEQYASTYRVVSVLTVLHQDWLNGKEYKCKVSNKALGAPIEKTISKAKGQPREPQVYTLPPSRDELTKNQVSLSCAVKGFYPSDIAVEWESNGQPENNYKTTPPVLDSDGSFFLVSKLTVDKSRWQQGNVFSCSVMHEALHNHYTQKSLSLSPGK

SEQ ID NO: 120 - protein, 296 aa, Artificial Sequence
  Description of Artificial Sequence: Synthetic polypeptide
EEDCKVHCVKEWMAGKACAERNKSYTIGRAHCSGQKFDVFKCLDHCAAPGGGGSGGGGSGGGGSEPKSSDKTHTCPPCPAPELLGGPSVFLFPPKPKDTLMISRTPEVTCVVVDVSHEDPEVKFNWYVDGVEVHNAKTKPREEQYASTYRVVSVLTVLHQDWLNGKEYKCKVSNKALGAPIEKTISKAKGQPREPQVYTLPPSRDELTKNQVSLSCAVKGFYPSDIAVEWESNGQPENNYKTTPPVLDSDGSFFLVSKLTVDKSRWQQGNVFSCSVMHEALHNHYTQKSLSLSPGK

SEQ ID NO: 121 - protein, 550 aa, Artificial Sequence
  Description of Artificial Sequence: Synthetic polypeptide
EVQLVESGGGLVQPGGSLKLSCAASGFTFNKYAMNWVRQAPGKGLEWVARIRSKYNNYATYYADSVKDRFTISRDDSKNTAYLQMNNLKTEDTAVYYCVRHGNFGNSYISYWAYWGQGTLVTVSSGGGGSGGGGSGGGGSQTVVTQEPSLTVSPGGTVTLTCGSSTGAVTSGNYPNWVQQKPGQAPRGLIGGTKFLAPGTPARFSGSLLGGKAALTLSGVQPEDEAEYYCVLWYSNRWVFGGGTKLTVLGGGGSEPKSSDKTHTCPPCPAPELLGGPSVFLFPPKPKDTLMISRTPEVTCVVVDVSHEDPEVKFNWYVDGVEVHNAKTKPREEQYASTYRVVSVLTVLHQDWLNGKEYKCKVSNKALGAPIEKTISKAKGQPREPQVYTLPPSRDELTKNQVSLTCLVKGFYPSDIAVEWESNGQPENNYKTTPPVLDSDGSFFLYSKLTVDKSRWQQGNVFSCSVMHEALHNHYTQKSLSLSPGKGGGGSGGGGSGGGGSEEDCKVHCVKEWMAGKACAERQKSYTIGRAHCSGQKFDVFKCLDHCAAP

SEQ ID NO: 122 - protein, 249 aa, Artificial Sequence
  Description of Artificial Sequence: Synthetic polypeptide
EVQLVESGGGLVQPGGSLKLSCAASGFTFNKYAMNWVRQAPGKGLEWVARIRSKYNNYATYYADSVKDRFTISRDDSKNTAYLQMNNLKTEDTAVYYCVRHGNFGNSYISYWAYWGQGTLVTVSSGGGGSGGGGSGGGGSQTVVTQEPSLTVSPGGTVTLTCGSSTGAVTSGNYPNWVQQKPGQAPRGLIGGTKFLAPGTPARFSGSLLGGKAALTLSGVQPEDEAEYYCVLWYSNRWVFGGGTKLTVL

SEQ ID NO: 123 - protein, 486 aa, Artificial Sequence
  Description of Artificial Sequence: Synthetic polypeptide
EVQLVESGGGLVQPGGSLKLSCAASGFTFNKYAMNWVRQAPGKGLEWVARIRSKYNNYATYYADSVKDRFTISRDDSKNTAYLQMNNLKTEDTAVYYCVRHGNFGNSYISYWAYWGQGTLVTVSSGGGGSGGGGSGGGGSQTVVTQEPSLTVSPGGTVTLTCGSSTGAVTSGNYPNWVQQKPGQAPRGLIGGTKFLAPGTPARFSGSLLGGKAALTLSGVQPEDEAEYYCVLWYSNRWVFGGGTKLTVLGGGGSEPKSSDKTHTCPPCPAPELLGGPSVFLFPPKPKDTLMISRTPEVTCVVVDVSHEDPEVKFNWYVDGVEVHNAKTKPREEQYASTYRVVSVLTVLHQDWLNGKEYKCKVSNKALGAPIEKTISKAKGQPREPQVYTLPPSRDELTKNQVSLWCLVKGFYPSDIAVEWESNGQPENNYKTTPPVLDSDGSFFLYSKLTVDKSRWQQGNVFSCSVMHEALHNHYTQKSLSLSPGK

SEQ ID NO: 124 - protein, 232 aa, Artificial Sequence
  Description of Artificial Sequence: Synthetic polypeptide
EPKSSDKTHTCPPCPAPELLGGPSVFLFPPKPKDTLMISRTPEVTCVVVDVSHEDPEVKFNWYVDGVEVHNAKTKPREEQYASTYRVVSVLTVLHQDWLNGKEYKCKVSNKALGAPIEKTISKAKGQPREPQVYTLPPSRDELTKNQVSLWCLVKGFYPSDIAVEWESNGQPENNYKTTPPVLDSDGSFFLYSKLTVDKSRWQQGNVFSCSVMHEALHNHYTQKSLSLSPGK

SEQ ID NO: 125 - protein, 232 aa, Artificial Sequence
  Description of Artificial Sequence: Synthetic polypeptide
EPKSSDKTHTCPPCPAPELLGGPSVFLFPPKPKDTLMISRTPEVTCVVVDVSHEDPEVKFNWYVDGVEVHNAKTKPREEQYASTYRVVSVLTVLHQDWLNGKEYKCKVSNKALGAPIEKTISKAKGQPREPQVYTLPPSRDELTKNQVSLSCAVKGFYPSDIAVEWESNGQPENNYKTTPPVLDSDGSFFLVSKLTVDKSRWQQGNVFSCSVMHEALHNHYTQKSLSLSPGK

SEQ ID NO: 126 - protein, 232 aa, Artificial Sequence
  Description of Artificial Sequence: Synthetic polypeptide
EPKSCDKTHTCPPCPAPELLGGPSVFLFPPKPKDTLMISRTPEVTCVVVDVSHEDPEVKFNWYVDGVEVHNAKTKPREEQYNSTYRVVSVLTVLHQDWLNGKEYKCKVSNKALPAPIEKTISKAKGQPREPQVYTLPPSRDELTKNQVSLWCLVKGFYPSDIAVEWESNGQPENNYKTTPPVLDSDGSFFLYSKLTVDKSRWQQGNVFSCSVMHEALHNHYTQKSLSLSPGK

SEQ ID NO: 127 - protein, 232 aa, Artificial Sequence
  Description of Artificial Sequence: Synthetic polypeptide
EPKSCDKTHTCPPCPAPELLGGPSVFLFPPKPKDTLMISRTPEVTCVVVDVSHEDPEVKFNWYVDGVEVHNAKTKPREEQYNSTYRVVSVLTVLHQDWLNGKEYKCKVSNKALPAPIEKTISKAKGQPREPQVYTLPPSRDELTKNQVSLSCAVKGFYPSDIAVEWESNGQPENNYKTTPPVLDSDGSFFLVSKLTVDKSRWQQGNVFSCSVMHEALHNHYTQKSLSLSPGK

SEQ ID NO: 128 - protein, 232 aa, Artificial Sequence
  Description of Artificial Sequence: Synthetic polypeptide
EPKSCDKTHTCPPCPAPELLGGPSVFLFPPKPKDTLMISRTPEVTCVVVDVSHEDPEVKFNWYVDGVEVHNAKTKPREEQYNSTYRVVSVLTVLHQDWLNGKEYKCKVSNKALPAPIEKTISKAKGQPREPQVYTLPPCRDELTKNQVSLWCLVKGFYPSDIAVEWESNGQPENNYKTTPPVLDSDGSFFLYSKLTVDKSRWQQGNVFSCSVMHEALHNHYTQKSLSLSPGK

SEQ ID NO: 129 - protein, 232 aa, Artificial Sequence
  Description of Artificial Sequence: Synthetic polypeptide
EPKSCDKTHTCPPCPAPELLGGPSVFLFPPKPKDTLMISRTPEVTCVVVDVSHEDPEVKFNWYVDGVEVHNAKTKPREEQYNSTYRVVSVLTVLHQDWLNGKEYKCKVSNKALPAPIEKTISKAKGQPREPQVCTLPPSRDELTKNQVSLSCAVKGFYPSDIAVEWESNGQPENNYKTTPPVLDSDGSFFLVSKLTVDKSRWQQGNVFSCSVMHEALHNHYTQKSLSLSPGK

SEQ ID NO: 130 - protein, 232 aa, Artificial Sequence
  Description of Artificial Sequence: Synthetic polypeptide
EPKSCDKTHTCPPCPAPELLGGPSVFLFPPKPKDTLMISRTPEVTCVVVDVSHEDPEVKFNWYVDGVEVHNAKTKPREEQYNSTYRVVSVLTVLHQDWLNGKEYKCKVSNKALPAPIEKTISKAKGQPREPQVYTLPPSRDELTKNQVSLTCLVKGFYPSDIAVEWESNGQPENNYDTTPPVLDSDGSFFLYSDLTVDKSRWQQGNVFSCSVMHEALHNHYTQKSLSLSPGK

SEQ ID NO: 131 - protein, 232 aa, Artificial Sequence
  Description of Artificial Sequence: Synthetic polypeptide
EPKSCDKTHTCPPCPAPELLGGPSVFLFPPKPKDTLMISRTPEVTCVVVDVSHEDPEVKFNWYVDGVEVHNAKTKPREEQYNSTYRVVSVLTVLHQDWLNGKEYKCKVSNKALPAPIEKTISKAKGQPREPQVYTLPPSRKELTKNQVSLTCLVKGFYPSDIAVEWESNGQPENNYKTTPPVLKSDGSFFLYSKLTVDKSRWQQGNVFSCSVMHEALHNHYTQKSLSLSPGK

SEQ ID NO: 132 - protein, 232 aa, Artificial Sequence
  Description of Artificial Sequence: Synthetic polypeptide
EPKSCDKTHTCPPCPAPELLGGPSVFLFPPKPKDTLMISRTPEVTCVVVDVSHEDPEVKFNWYVDGVEVHNAKTKPREEQYNSTYRVVSVLTVLHQDWLNGKEYKCKVSNKALPAPIEKTISKAKGQPREPQVYTLPPSRDELTKNQVHLTCLVKGFYPSDIAVEWESNGQPENNYKTTPPVLDSDGSFALYSKLTVDKSRWQQGNVFSCSVMHEALHNHYTQKSLSLSPGK

SEQ ID NO: 133 - protein, 232 aa, Artificial Sequence
  Description of Artificial Sequence: Synthetic polypeptide
EPKSCDKTHTCPPCPAPELLGGPSVFLFPPKPKDTLMISRTPEVTCVVVDVSHEDPEVKFNWYVDGVEVHNAKTKPREEQYNSTYRVVSVLTVLHQDWLNGKEYKCKVSNKALPAPIEKTISKAKGQPREPQVTTLPPSRDELTKNQVSLTCLVKGFYPSDIAVEWESNGQPENNYKTFPPVLDSDGSFFLYSKLTVDKSRWQQGNVFSCSVMHEALHNHYTQKSLSLSPGK

SEQ ID NO: 134 - protein, 232 aa, Artificial Sequence
  Description of Artificial Sequence: Synthetic polypeptide
EPKSCEKTHTCPECPAPELLGGPSVFLFPPKPKDTLMISRTPEVTCVVVDVSHEDPEVKFNWYVDGVEVHNAKTKPREEQYNSTYRVVSVLTVLHQDWLNGKEYKCKVSNKALPAPIEKTISKAKGQPREPQVYTLPPSRDELTKNQVSLTCEVKGFYPSDIAVEWESNGQPENNYKTTPPVLDSDGSFFLYSKLTVDKSRWQQGNVFSCSVMHEALHNHYTQKSLSLSPGK

SEQ ID NO: 135 - protein, 232 aa, Artificial Sequence
  Description of Artificial Sequence: Synthetic polypeptide
EPKSCRKTHTCPRCPAPELLGGPSVFLFPPKPKDTLMISRTPEVTCVVVDVSHEDPEVKFNWYVDGVEVHNAKTKPREEQYNSTYRVVSVLTVLHQDWLNGKEYKCKVSNKALPAPIEKTISKAKGQPREPQVYTLPPSRDELTKNQVSLTCLVKGFYPSDIAVEWESNGQPENNYKTTPPVLDSDGSFFLYSRLTVDKSRWQQGNVFSCSVMHEALHNHYTQKSLSLSPGK

SEQ ID NO: 136 - protein, 232 aa, Artificial Sequence
  Description of Artificial Sequence: Synthetic polypeptide
EPKSCDKTHTCPPCPAPELLGGPSVFLFPPKPKDTLMISRTPEVTCVVVDVSHEDPEVKFNWYVDGVEVHNAKTKPREEQYNSTYRVVSVLTVLHQDWLNGKEYKCKVSNKALPAPIEKTISKAKGQPREPQVYTLPPSRDELTKNQVSLTCLVKGFYPSDIAVEWESNGQPENNYKTTPPVLDSDGSFLLYSKLTVDKSRWQQGNVFSCSVMHEALHNHYTQKSLSLSPGK

SEQ ID NO: 137 - protein, 232 aa, Artificial Sequence
  Description of Artificial Sequence: Synthetic polypeptide
EPKSCDKTHTCPPCPAPELLGGPSVFLFPPKPKDTLMISRTPEVTCVVVDVSHEDPEVKFNWYVDGVEVHNAKTKPREEQYNSTYRVVSVLTVLHQDWLNGKEYKCKVSNKALPAPIEKTISKAKGQPREPQVYTLPPSRDELTKNQVSLTCLVKGFYPSDIAVEWESNGQPENNYKTTPPVLDSDGSFFLYSRLTVDKSRWQQGNVFSCSVMHEALHNHYTQKSLSLSPGK

SEQ ID NO: 138 - protein, 232 aa, Artificial Sequence
  Description of Artificial Sequence: Synthetic polypeptide
EPKSCDKTHTCPPCPAPELLGGPSVFLFPPKPKDTLMISRTPEVTCVVVDVSHEDPEVKFNWYVDGVEVHNAKTKPREEQYNSTYRVVSVLTVLHQDWLNGKEYKCKVSNKALPAPIEKTISKAKGQPREPQVYVLPPSRDELTKNQVSLLCLVKGFYPSDIAVEWESNGQPENNYLTWPPVLDSDGSFFLYSKLTVDKSRWQQGNVFSCSVMHEALHNHYTQKSLSLSPGK

SEQ ID NO: 139 - protein, 232 aa, Artificial Sequence
  Description of Artificial Sequence: Synthetic polypeptide
EPKSCDKTHTCPPCPAPELLGGPSVFLFPPKPKDTLMISRTPEVTCVVVDVSHEDPEVKFNWYVDGVEVHNAKTKPREEQYNSTYRVVSVLTVLHQDWLNGKEYKCKVSNKALPAPIEKTISKAKGQPREPQVYVYPPSRDELTKNQVSLTCLVKGFYPSDIAVEWESNGQPENNYKTTPPVLDSDGSFALVSKLTVDKSRWQQGNVFSCSVMHEALHNHYTQKSLSLSPGK

SEQ ID NO: 140 - protein, 232 aa, Artificial Sequence
  Description of Artificial Sequence: Synthetic polypeptide
EPKSCDKTHTCPPCPAPELLGGPSVFLFPPKPKDTLMISRTPEVTCVVVDVSHEDPEVKFNWYVDGVEVHNAKTKPREEQYNSTYRVVSVLTVLHQDWLNGKEYKCKVSNKALPAPIEKTISKAKGQPREPQVYTLPPSRDELTENQVSLTCLVKGFYPSDIAVEWESNGQPENNYKTTPPVLDSDGSFFLYSWLTVDKSRWQQGNVFSCSVMHEALHNHYTQKSLSLSPGK

SEQ ID NO: 141 - protein, 232 aa, Artificial Sequence
  Description of Artificial Sequence: Synthetic polypeptide
EPKSCDKTHTCPPCPAPELLGGPSVFLFPPKPKDTLMISRTPEVTCVVVDVSHEDPEVKFNWYVDGVEVHNAKTKPREEQYNSTYRVVSVLTVLHQDWLNGKEYKCKVSNKALPAPIEKTISKAKGQPREPRVYTLPPSRDELTKNQVSLTCLVKGFYPSDIAVEWESNGQPENNYKTTPPVLVSDGSFTLYSKLTVDKSRWQQGNVFSCSVMHEALHNHYTQKSLSLSPGK

SEQ ID NO: 142 - protein, 232 aa, Artificial Sequence
  Description of Artificial Sequence: Synthetic polypeptide
EPKSCDKTHTCPPCPAPELLGGPSVFLFPPKPKDTLMISRTPEVTCVVVDVSHEDPEVKFNWYVDGVEVHNAKTKPREEQYNSTYRVVSVLTVLHQDWLNGKEYKCKVSNKALPAPIEKTISKAKGQPREPQVCTLPPSRDELTENQVSLTCLVKGFYPSDIAVEWESNGQPENNYKTTPPVLDSDGSFFLYSWLTVDKSRWQQGNVFSCSVMHEALHNHYTQKSLSLSPGK

SEQ ID NO: 143 - protein, 232 aa, Artificial Sequence
  Description of Artificial Sequence: Synthetic polypeptide
EPKSCDKTHTCPPCPAPELLGGPSVFLFPPKPKDTLMISRTPEVTCVVVDVSHEDPEVKFNWYVDGVEVHNAKTKPREEQYNSTYRVVSVLTVLHQDWLNGKEYKCKVSNKALPAPIEKTISKAKGQPREPRVYTLPPCRDELTKNQVSLTCLVKGFYPSDIAVEWESNGQPENNYKTTPPVLVSDGSFTLYSKLTVDKSRWQQGNVFSCSVMHEALHNHYTQKSLSLSPGK

SEQ ID NO: 144 - protein, 232 aa, Artificial Sequence
  Description of Artificial Sequence: Synthetic polypeptide
EPKSCDKTHTCPPCPAPELLGGPSVFLFPPKPKDTLMISRTPEVTCVVVDVSHEDPEVKFNWYVDGVEVHNAKTKPREEQYNSTYRVVSVLTVLHQDWLNGKEYKCKVSNKALPAPIEKTISKAKGQPREPQVYTLPPSRDELTKNQVSLTCLVEGFYPSDIAVEWESNGQPENNYKTTPPVLDSDGSFFLYSWLTVDKSRWQQGNVFSCSVMHEALHNHYTQKSLSLSPGK

SEQ ID NO: 145 - protein, 232 aa, Artificial Sequence
  Description of Artificial Sequence: Synthetic polypeptide
EPKSCDKTHTCPPCPAPELLGGPSVFLFPPKPKDTLMISRTPEVTCVVVDVSHEDPEVKFNWYVDGVEVHNAKTKPREEQYNSTYRVVSVLTVLHQDWLNGKEYKCKVSNKALPAPIEKTISKAKGQPREPQVYTLPPSRDNLTKNQVSLTCLVKGFYPSDIAVEWESNGQPENNYKTTPPVLVSDGSFTLYSKLTVDKSRWQQGNVFSCSVMHEALHNHYTQKSLSLSPGK

SEQ ID NO: 146 - protein, 232 aa, Artificial Sequence
  Description of Artificial Sequence: Synthetic polypeptide
EPKSCDKTHTCPPCPAPELLGGPSVFLFPPKPKDTLMISRTPEVTCVVVDVSHEDPEVKFNWYVDGVEVHNAKTKPREEQYNSTYRVVSVLTVLHQDWLNGKEYKCKVSNKALPAPIEKTISKAKGQPREPQVYTLPPSRDELTDNQVSLTCLVKGFYPSDIAVEWESNGQPENNYKTTPPVLMSDGSFFLASKLTVDKSRWQQGNVFSCSVMHEALHNHYTQKSLSLSPGK

SEQ ID NO: 147 - protein, 232 aa, Artificial Sequence
  Description of Artificial Sequence: Synthetic polypeptide
EPKSCDKTHTCPPCPAPELLGGPSVFLFPPKPKDTLMISRTPEVTCVVVDVSHEDPEVKFNWYVDGVEVHNAKTKPREEQYNSTYRVVSVLTVLHQDWLNGKEYKCKVSNKALPAPIEKTISKAKGQPRRPRVYTLPPSRDELTKNQVSLVCLVKGFYPSDIAVEWESNGQPENNYKTTPPVLDSDGSFFLYSVLTVDKSRWQQGNVFSCSVMHEALHNHYTQKSLSLSPGK

SEQ ID NO: 148 - protein, 232 aa, Artificial Sequence
  Description of Artificial Sequence: Synthetic polypeptide
EPKSCDKTHTCPPCPAPELLGGPSVFLFPPKPKDTLMISRTPEVTCVVVDVSHEDPEVKFNWYVDGVEVHNAKTKPREEQYNSTYRVVSVLTVLHQDWLNGKEYKCKVSNKALPAPIEKTISKAKGQPREPQVSTLPPSRDELTKNQVSLMCLVYGFYPSDIAVEWESNGQPENNYKTTPPVLDSDGSFFLYSVLTVDKSRWQQGNVFSCSVMHEALHNHYTQKSLSLSPGK

SEQ ID NO: 149 - protein, 232 aa, Artificial Sequence
  Description of Artificial Sequence: Synthetic polypeptide
EPKSCDKTHTCPPCPAPELLGGPSVFLFPPKPKDTLMISRTPEVTCVVVDVSHEDPEVKFNWYVDGVEVHNAKTKPREEQYNSTYRVVSVLTVLHQDWLNGKEYKCKVSNKALPAPIEKTISKAKGQPREPQVYTLPPSRGDLTKNQVQLTCLVKGFYPSDIAVEWESNGQPENNYKTTPPVLDSDGSFFLASKLTVDKSRWQQGNVFSCSVMHEALHNHYTQKSLSLSPGK

SEQ ID NO: 150 - protein, 232 aa, Artificial Sequence
  Description of Artificial Sequence: Synthetic polypeptide
EPKSCDKTHTCPPCPAPELLGGPSVFLFPPKPKDTLMISRTPEVTCVVVDVSHEDPEVKFNWYVDGVEVHNAKTKPREEQYNSTYRVVSVLTVLHQDWLNGKEYKCKVSNKALPAPIEKTISKAKGQPREPQVYTDPPSRDELTKNQVSLTCEVKGFYPSDIAVEWESNGQPENNYKTTPPVLDSDGSFFLYSKLTVDKSRWQQGNVFSCSVMHEALHNHYTQKSLSLSPGK

SEQ ID NO: 151 - protein, 232 aa, Artificial Sequence
  Description of Artificial Sequence: Synthetic polypeptide
EPKSCDKTHTCPPCPAPELLGGPSVFLFPPKPKDTLMISRTPEVTCVVVDVSHEDPEVKFNWYVDGVEVHNAKTKPREEQYNSTYRVVSVLTVLHQDWLNGKEYKCKVSNKALPAPIEKTISKAKGQPREPQVYTKPPSRDELTKNQVSLKCLVKGFYPSDIAVEWESNGQPENNYKTTPPVLDSDGSFFLYSKLTVDKSRWQQGNVFSCSVMHEALHNHYTQKSLSLSPGK

SEQ ID NO: 152 - protein, 232 aa, Artificial Sequence
  Description of Artificial Sequence: Synthetic polypeptide
EPKSCDKTHTCPPCPAPELLGGPSVFLFPPKPKDTLMISRTPEVTCVVVDVSHEDPEVKFNWYVDGVEVHNAKTKPREEQYNSTYRVVSVLTVLHQDWLNGKEYKCKVSNKALPAPIEKTISKAKGQPREPQVYTLPPSRDELTKNQVSLTCDVSGFYPSDIAVEWESNGQPENNYKTTPPVLDSDGSFFLYSKLTVDKSRWQQGNVFSCSVMHEALHNHYTQKSLSLSPGK

SEQ ID NO: 153 - protein, 232 aa, Artificial Sequence
  Description of Artificial Sequence: Synthetic polypeptide
EPKSCDKTHTCPPCPAPELLGGPSVFLFPPKPKDTLMISRTPEVTCVVVDVSHEDPEVKFNWYVDGVEVHNAKTKPREEQYNSTYRVVSVLTVLHQDWLNGKEYKCKVSNKALPAPIEKTISKAKGQPREPQVYTLPPSRDQLTKNQVKLTCLVKGFYPSDIAVEWESNGQPENNYKTTPPVLDSDGSFFLYSKLTVDKSRWQQGNVFSCSVMHEALHNHYTQKSLSLSPGK

SEQ ID NO: 154 - protein, 4 aa, Artificial Sequence
  Description of Artificial Sequence: Synthetic peptide
GGGS

SEQ ID NO: 155 - protein, 2 aa, Artificial Sequence
  Description of Artificial Sequence: Synthetic peptide
  See specification as filed for detailed description of substitutions and preferred embodiments
GS

SEQ ID NO: 156 - protein, 2 aa, Artificial Sequence
  Description of Artificial Sequence: Synthetic peptide
  See specification as filed for detailed description of substitutions and preferred embodiments
GS

SEQ ID NO: 157 - protein, 5 aa, Artificial Sequence
  Description of Artificial Sequence: Synthetic peptide
GGSSG

SEQ ID NO: 158 - protein, 5 aa, Artificial Sequence
  Description of Artificial Sequence: Synthetic peptide
GGGGG

SEQ ID NO: 159 - protein, 8 aa, Artificial Sequence
  Description of Artificial Sequence: Synthetic peptide
GSGSGSGS

SEQ ID NO: 160 - protein, 4 aa, Artificial Sequence
  Description of Artificial Sequence: Synthetic peptide
GSGG

SEQ ID NO: 161 - protein, 5 aa, Artificial Sequence
  Description of Artificial Sequence: Synthetic peptide
GGGGS

SEQ ID NO: 162 - protein, 3 aa, Artificial Sequence
  Description of Artificial Sequence: Synthetic peptide
GGS

SEQ ID NO: 163 - protein, 12 aa, Artificial Sequence
  Description of Artificial Sequence: Synthetic peptide
GGGSGGGSGGGS

SEQ ID NO: 164 - protein, 11 aa, Artificial Sequence
  Description of Artificial Sequence: Synthetic peptide
GGGSGGSGGGS

SEQ ID NO: 165 - protein, 15 aa, Artificial Sequence
  Description of Artificial Sequence: Synthetic peptide
GGGGSGGGGSGGGGS

SEQ ID NO: 166 - protein, 12 aa, Artificial Sequence
  Description of Artificial Sequence: Synthetic peptide
KKYKPYVPVTTN

SEQ ID NO: 167 - protein, 10 aa, Artificial Sequence
  Description of Artificial Sequence: Synthetic peptide
EPKSSDKTHT

SEQ ID NO: 168 - protein, 74 aa, Artificial Sequence
  Description of Artificial Sequence: Synthetic polypeptide
AGSGGSGGSGGSPVPSTPPTNSSSTPPTPSPSPVPSTPPTNSSSTPPTPSPSPVPSTPPTNSSSTPPTPSPSAS

SEQ ID NO: 169 - protein, 74 aa, Artificial Sequence
  Description of Artificial Sequence: Synthetic polypeptide
AGSGGSGGSGGSPVPSTPPTPSPSTPPTPSPSPVPSTPPTNSSSTPPTPSPSPVPSTPPTPSPSTPPTPSPSAS

SEQ ID NO: 170 - protein, 66 aa, Artificial Sequence
  Description of Artificial Sequence: Synthetic polypeptide
AGSGGSGGSGGSPVPSTPPTPSPSTPPTPSPSGGSGNSSGSGGSPVPSTPPTPSPSTPPTPSPSAS

SEQ ID NO: 171 - protein, 74 aa, Artificial Sequence
  Description of Artificial Sequence: Synthetic polypeptide
AGSGGSGGSGGSPVPSTPPTPSPSTPPTPSPSPVPSTPPTPSPSTPPTPSPSPVPSTPPTPSPSTPPTPSPSAS

SEQ ID NO: 172 - protein, 152 aa, Artificial Sequence
  Description of Artificial Sequence: Synthetic polypeptide
AGSGGSGGSGGSPVPSTPPTPSPSTPPTPSPSIQRTPKIQVYSRHPAENGKSNFLNCYVSGFHPSDIEVDLLKNGERIEKVEHSDLSFSKDWSFYLLYYTEFTPTEKDEYACRVNHVTLSQPKIVKWDRDPVPSTPPTPSPSTPPTPSPSAS

SEQ ID NO: 173 - protein, 144 aa, Artificial Sequence
  Description of Artificial Sequence: Synthetic polypeptide
AGSGGSGGSGGSPVPSTPPTPSPSTPPTPSPSIQRTPKIQVYSRHPAENGKSNFLNCYVSGFHPSDIEVDLLKNGERIEKVEHSDLSFSKDWSFYLLYYTEFTPTEKDEYACRVNHVTLSQPKIVKWDRDGGSGGSGGSGGSAS

SEQ ID NO: 174 - protein, 242 aa, Artificial Sequence
  Description of Artificial Sequence: Synthetic polypeptide
AGPVPSTPPTPSPSTPPTPSPSIQRTPKIQVYSRHPAENGKSNFLNCYVSGFHPSDIEVDLLKNGERIEKVEHSDLSFSKDWSFYLLYYTEFTPTEKDEYACRVNHVTLSQPKIVKWDRDGGSGGSGGSGGSIQRTPKIQVYSRHPAENGKSNFLNCYVSGFHPSDIEVDLLKNGERIEKVEHSDLSFSKDWSFYLLYYTEFTPTEKDEYACRVNHVTLSQPKIVKWDRDGGSGGSGGSGAS

SEQ ID NO: 175 - protein, 262 aa, Artificial Sequence
  Description of Artificial Sequence: Synthetic polypeptide
AGSGGSGGSGGSPVPSTPPTPSPSTPPTPSPSIQRTPKIQVYSRHPAENGKSNFLNCYVSGFHPSDIEVDLLKNGERIEKVEHSDLSFSKDWSFYLLYYTEFTPTEKDEYACRVNHVTLSQPKIVKWDRDGGSGGSGGSGGSIQRTPKIQVYSRHPAENGKSNFLNCYVSGFHPSDIEVDLLKNGERIEKVEHSDLSFSKDWSFYLLYYTEFTPTEKDEYACRVNHVTLSQPKIVKWDRDPVPSTPPTPSPSTPPTPSPSAS

SEQ ID NO: 176 - protein, 121 aa, Artificial Sequence
  Description of Artificial Sequence: Synthetic polypeptide
AGSGGSGGSGGSPVPSTPPTPSPSTPPTPSPSQIFVKTLTGKTITLEVEPSDTIENVKAKIQDKEGIPPDQQRLIFAGKQLEDGRTLSDYNIQKESTLHLVLRLRGGGGSGGSGGSGGSAS

SEQ ID NO: 177 - protein, 326 aa, Artificial Sequence
  Description of Artificial Sequence: Synthetic polypeptide
AGSGGSGGSGGSPVPSTPPTPSPSTPPTPSPSDGRYSLTYIYTGLSKHVEDVPAFQALGSLNDLQFFRYNSKDRKSQPMGLWRQVEGMEDWKQDSQLQKAREDIFMETLKDIVEYYNDSNGSHVLQGRFGCEIENNRSSGAFWKYYYDGKDYIEFNKEIPAWVPFDPAAQITKQKWEAEPVYVQRAKAYLEEECPATLRKYLKYSKNILDRQDPPSVVVTSHQAPGEKKKLKCLAYDFYPGKIDVHWTRAGEVQEPELRGDVLHNGNGTYQSWVVVAVPPQDTAPYSCHVQHSSLAQPLVVPWEASPVPSTPPTPSPSTPPTPSAS

SEQ ID NO: 178 - protein, 606 aa, Artificial Sequence
  Description of Artificial Sequence: Synthetic polypeptide
AGSGGSGGSGGSGGSGGSGGSGGSDGRYSLTYIYTGLSKHVEDVPAFQALGSLNDLQFFRYNSKDRKSQPMGLWRQVEGMEDWKQDSQLQKAREDIFMETLKDIVEYYNDSNGSHVLQGRFGCEIENNRSSGAFWKYYYDGKDYIEFNKEIPAWVPFDPAAQITKQKWEAEPVYVQRAKAYLEEECPATLRKYLKYSKNILDRQDPPSVVVTSHQAPGEKKKLKCLAYDFYPGKIDVHWTRAGEVQEPELRGDVLHNGNGTYQSWVVVAVPPQDTAPYSCHVQHSSLAQPLVVPWEASGGSGGSGGSGGSDGRYSLTYIYTGLSKHVEDVPAFQALGSLNDLQFFRYNSKDRKSQPMGLWRQVEGMEDWKQDSQLQKAREDIFMETLKDIVEYYNDSNGSHVLQGRFGCEIENNRSSGAFWKYYYDGKDYIEFNKEIPAWVPFDPAAQITKQKWEAEPVYVQRAKAYLEEECPATLRKYLKYSKNILDRQDPPSVVVTSHQAPGEKKKLKCLAYDFYPGKIDVHWTRAGEVQEPELRGDVLHNGNGTYQSWVVVAVPPQDTAPYSCHVQHSSLAQPLVVPWEASPVPSTPPTPSPSTPPTPSPSAS

SEQ ID NO: 179 - protein, 46 aa, Artificial Sequence
  Description of Artificial Sequence: Synthetic polypeptide
AGSGNSSGSGGSGGSGNSSGSGGSPVPSTPPTPSPSTPPTPSPSAS

SEQ ID NO: 180 - protein, 141 aa, Artificial Sequence
  Description of Artificial Sequence: Synthetic polypeptide
KLSGGGGSGGGGSGGGGSAEAWYNLGNAYYKQGDYQKAIEYYQKALELDPNNAEAWYNLGNAYYKQGDYQKAIEYYQKALELDPNNAEAWYNLGNAYYKQGDYQKAIEDYQKALELDPNNLQRSAGGGGSGGGGSGGGGAS

SEQ ID NO: 181 - protein, 245 aa, Artificial Sequence
  Description of Artificial Sequence: Synthetic polypeptide
KLSGGGGSGGGGSGGGGSAEAWYNLGNAYYKQGDYQKAIEYYQKALELDPNNAEAWYNLGNAYYKQGDYQKAIEYYQKALELDPNNAEAWYNLGNAYYKQGDYQKAIEDYQKALELDPNNLQAEAWKNLGNAYYKQGDYQKAIEYYQKALELDPNNASAWYNLGNAYYKQGDYQKAIEYYQKALELDPNNAKAWYRRGNAYYKQGDYQKAIEDYQKALELDPNNRSRSAGGGGSGGGGSGGGGAS

SEQ ID NO: 182 - protein, 349 aa, Artificial Sequence
  Description of Artificial Sequence: Synthetic polypeptide
KLSGGGGSGGGGSGGGGSAEAWYNLGNAYYKQGDYQKAIEYYQKALELDPNNAEAWYNLGNAYYKQGDYQKAIEYYQKALELDPNNAEAWYNLGNAYYKQGDYQKAIEDYQKALELDPNNLQAEAWKNLGNAYYKQGDYQKAIEYYQKALELDPNNASAWYNLGNAYYKQGDYQKAIEYYQKALELDPNNAKAWYRRGNAYYKQGDYQKAIEDYQKALELDPNNRSAEAWYNLGNAYYKQGDYQKAIEYYQKALELDPNNAEAWYNLGNAYYKQGDYQKAIEYYQKALELDPNNAEAWYNLGNAYYKQGDYQKAIEDYQKALELDPNNLQRSAGGGGSGGGGSGGGGAS

SEQ ID NO: 183 - protein, 451 aa, Artificial Sequence
  Description of Artificial Sequence: Synthetic polypeptide
KLSGGGGSGGGGSGGGGSAEAWYNLGNAYYKQGDYQKAIEYYQKALELDPNNAEAWYNLGNAYYKQGDYQKAIEYYQKALELDPNNAEAWYNLGNAYYKQGDYQKAIEDYQKALELDPNNLQAEAWKNLGNAYYKQGDYQKAIEYYQKALELDPNNASAWYNLGNAYYKQGDYQKAIEYYQKALELDPNNAKAWYRRGNAYYKQGDYQKAIEDYQKALELDPNNRSAEAWYNLGNAYYKQGDYQKAIEYYQKALELDPNNAEAWYNLGNAYYKQGDYQKAIEYYQKALELDPNNAEAWYNLGNAYYKQGDYQKAIEDYQKALELDPNNLQAEAWKNLGNAYYKQGDYQKAIEYYQKALELDPNNASAWYNLGNAYYKQGDYQKAIEYYQKALELDPNNAKAWYRRGNAYYKQGDYQKAIEDYQKALELDPNNRSAGGGGSGGGGSGGGGAS

SEQ ID NO: 184 - protein, 7 aa, Artificial Sequence
  Description of Artificial Sequence: Synthetic peptide
GGGGSAS

SEQ ID NO: 185 - protein, 12 aa, Artificial Sequence
  Description of Artificial Sequence: Synthetic peptide
GGGGSGGGGSAS

SEQ ID NO: 186 - protein, 17 aa, Artificial Sequence
  Description of Artificial Sequence: Synthetic peptide
GGGGSGGGGSGGGGSAS

SEQ ID NO: 187 - protein, 27 aa, Artificial Sequence
  Description of Artificial Sequence: Synthetic peptide
GGGGSGGGGSGGGGSGGGGSGGGGSAS

SEQ ID NO: 188 - protein, 32 aa, Artificial Sequence
  Description of Artificial Sequence: Synthetic polypeptide
GGGGSGGGGSGGGGSGGGGSGGGGSGGGGSAS

SEQ ID NO: 189 - protein, 37 aa, Artificial Sequence
  Description of Artificial Sequence: Synthetic polypeptide
AGGGSGGGGSGGGGSGGGGSGGGGSGGGGSGGGGSAS

SEQ ID NO: 190 - protein, 42 aa, Artificial Sequence
  Description of Artificial Sequence: Synthetic polypeptide
AGGGSGGGGSGGGGSGGGGSGGGGSGGGGSGGGGSGGGGSAS

SEQ ID NO: 191 - protein, 47 aa, Artificial Sequence
  Description of Artificial Sequence: Synthetic polypeptide
AGGGSGGGGSGGGGSGGGGSGGGGSGGGGSGGGGSGGGGSGGGGSAS

SEQ ID NO: 192 - protein, 1 aa, Artificial Sequence
  Description of Artificial Sequence: Synthetic peptide
G

SEQ ID NO: 193 - protein, 1 aa, Artificial Sequence
  Description of Artificial Sequence: Synthetic peptide
A

SEQ ID NO: 194 - protein, 2 aa, Artificial Sequence
  Description of Artificial Sequence: Synthetic peptide
GS

SEQ ID NO: 195 - protein, 2 aa, Artificial Sequence
  Description of Artificial Sequence: Synthetic peptide
GA

SEQ ID NO: 196 - protein, 3 aa, Artificial Sequence
  Description of Artificial Sequence: Synthetic peptide
GSS

SEQ ID NO: 197 - protein, 4 aa, Artificial Sequence
  Description of Artificial Sequence: Synthetic peptide
GSSS

SEQ ID NO: 198 - protein, 5 aa, Artificial Sequence
  Description of Artificial Sequence: Synthetic peptide
GSSSS

SEQ ID NO: 199 - protein, 40 aa, Artificial Sequence
  Description of Artificial Sequence: Synthetic polypeptide
  SITE (1)..(40): This sequence may encompass 1-10 "Gly Ser Ser Ser" repeating units
GSSSGSSSGSSSGSSSGSSSGSSSGSSSGSSSGSSSGSSS

SEQ ID NO: 200 - protein, 2 aa, Artificial Sequence
  Description of Artificial Sequence: Synthetic peptide
VA

SEQ ID NO: 201 - protein, 2 aa, Artificial Sequence
  Description of Artificial Sequence: Synthetic peptide
  MOD_RES (2)..(2): Citrulline
VX

SEQ ID NO: 202 - protein, 4 aa, Artificial Sequence
  Description of Artificial Sequence: Synthetic peptide
  MOD_RES (3)..(3): Citrulline
GVXG

SEQ ID NO: 203 - protein, 2 aa, Artificial Sequence
  Description of Artificial Sequence: Synthetic peptide
FK

SEQ ID NO: 204 - protein, 2 aa, Artificial Sequence
  Description of Artificial Sequence: Synthetic peptide
VK

SEQ ID NO: 205 - protein, 4 aa, Artificial Sequence
  Description of Artificial Sequence: Synthetic peptide
GVAG

SEQ ID NO: 206 - protein, 5 aa, Artificial Sequence
  Description of Artificial Sequence: Synthetic peptide
  MOD_RES (3)..(3): Citrulline
GVXGG

SEQ ID NO: 207 - protein, 2 aa, Artificial Sequence
  Description of Artificial Sequence: Synthetic peptide
  MOD_RES (1)..(1): 6-azidohexanoic acid
XG

SEQ ID NO: 208 - protein, 3 aa, Artificial Sequence
  Description of Artificial Sequence: Synthetic peptide
  MOD_RES (1)..(1): 6-azidohexanoic acid
XGG

SEQ ID NO: 209 - protein, 2 aa, Artificial Sequence
  Description of Artificial Sequence: Synthetic peptide
  MOD_RES (1)..(1): 6-azidohexanoic acid
XA

SEQ ID NO: 210 - protein, 3 aa, Artificial Sequence
  Description of Artificial Sequence: Synthetic peptide
  MOD_RES (1)..(1): 6-azidohexanoic acid
XAA

SEQ ID NO: 211 - protein, 3 aa, Artificial Sequence
  Description of Artificial Sequence: Synthetic peptide
  MOD_RES (1)..(1): 6-azidohexanoic acid
XGS

SEQ ID NO: 212 - protein, 3 aa, Artificial Sequence
  Description of Artificial Sequence: Synthetic peptide
  MOD_RES (1)..(1): 6-azidohexanoic acid
XGA

SEQ ID NO: 213 - protein, 5 aa, Artificial Sequence
  Description of Artificial Sequence: Synthetic peptide
  MOD_RES (1)..(1): 6-azidohexanoic acid
  MOD_RES (4)..(4): Citrulline
XGVXG

SEQ ID NO: 214 - protein, 5 aa, Artificial Sequence
  Description of Artificial Sequence: Synthetic peptide
  MOD_RES (1)..(1): 6-azidohexanoic acid
XGVAG

SEQ ID NO: 215 - protein, 6 aa, Artificial Sequence
  Description of Artificial Sequence: Synthetic peptide
  MOD_RES (1)..(1): 6-azidohexanoic acid
  MOD_RES (4)..(4): Citrulline
XGVXGG

SEQ ID NO: 216 - protein, 2 aa, Artificial Sequence
  Description of Artificial Sequence: Synthetic peptide
VR

SEQ ID NO: 217 - protein, 2 aa, Artificial Sequence
  Description of Artificial Sequence: Synthetic peptide
  MOD_RES (2)..(2): Citrulline
VX

SEQ ID NO: 218 - protein, 2 aa, Artificial Sequence
  Description of Artificial Sequence: Synthetic peptide
FK

SEQ ID NO: 219 - protein, 2 aa, Artificial Sequence
  Description of Artificial Sequence: Synthetic peptide
MK

SEQ ID NO: 220 - protein, 2 aa, Artificial Sequence
  Description of Artificial Sequence: Synthetic peptide
NK

SEQ ID NO: 221 - protein, 2 aa, Artificial Sequence
  Description of Artificial Sequence: Synthetic peptide
IP

SEQ ID NO: 222 - protein, 2 aa, Artificial Sequence
  Description of Artificial Sequence: Synthetic peptide
GI

SEQ ID NO: 223 - protein, 2 aa, Artificial Sequence
  Description of Artificial Sequence: Synthetic peptide
GL

SEQ ID NO: 224 - protein, 2 aa, Artificial Sequence
  Description of Artificial Sequence: Synthetic peptide
GY

SEQ ID NO: 225 - protein, 2 aa, Artificial Sequence
  Description of Artificial Sequence: Synthetic peptide
GM

SEQ ID NO: 226 - protein, 2 aa, Artificial Sequence
  Description of Artificial Sequence: Synthetic peptide
MI

SEQ ID NO: 227 - protein, 2 aa, Artificial Sequence
  Description of Artificial Sequence: Synthetic peptide
AI

SEQ ID NO: 228 - protein, 2 aa, Artificial Sequence
  Description of Artificial Sequence: Synthetic peptide
PI

SEQ ID NO: 229 - protein, 8 aa, Artificial Sequence
  Description of Artificial Sequence: Synthetic peptide
GPQGIAGQ

SEQ ID NO: 230 - protein, 8 aa, Artificial Sequence
  Description of Artificial Sequence: Synthetic peptide
GPQGIFGQ

SEQ ID NO: 231 - protein, 8 aa, Artificial Sequence
  Description of Artificial Sequence: Synthetic peptide
GPQGIWGQ

SEQ ID NO: 232 - protein, 8 aa, Artificial Sequence
  Description of Artificial Sequence: Synthetic peptide
GPQGILGQ

SEQ ID NO: 233 - protein, 8 aa, Artificial Sequence
  Description of Artificial Sequence: Synthetic peptide
GPQGIRGQ

SEQ ID NO: 234 - protein, 8 aa, Artificial Sequence
  Description of Artificial Sequence: Synthetic peptide
GPLGIAGQ

SEQ ID NO: 235 - protein, 8 aa, Artificial Sequence
  Description of Artificial Sequence: Synthetic peptide
GPMGIAGQ

SEQ ID NO: 236 - protein, 8 aa, Artificial Sequence
  Description of Artificial Sequence: Synthetic peptide
GPYGIAGQ

SEQ ID NO: 237 - protein, 6 aa, Artificial Sequence
  Description of Artificial Sequence: Synthetic peptide
GSVAGS

SEQ ID NO: 238 - protein, 12 aa, Artificial Sequence
  Description of Artificial Sequence: Synthetic peptide
GGGGSVAGGGGS

SEQ ID NO: 239 - protein, 22 aa, Artificial Sequence
  Description of Artificial Sequence: Synthetic peptide
GGGGSGGGGSVAGGGGSGGGGS

SEQ ID NO: 240 - protein, 26 aa, Artificial Sequence
  Description of Artificial Sequence: Synthetic peptide
GGGGSGGGGSPLGLAGGGGGSGGGGS

SEQ ID NO: 241 - protein, 26 aa, Artificial Sequence
  Description of Artificial Sequence: Synthetic peptide
AEAAAKEAAAKAVAAEAAAKEAAAKA

SEQ ID NO: 242 - protein, 18 aa, Artificial Sequence
  Description of Artificial Sequence: Synthetic peptide
RLIEDICLPRWGCLWEDD

SEQ ID NO: 243 - protein, 45 aa, Artificial Sequence
  Description of Artificial Sequence: Synthetic polypeptide
LKNAKEDAIAELKKAGITSDFYFNAINKAKTVEEVNALKNEILKA

SEQ ID NO: 244 - protein, 45 aa, Artificial Sequence
  Description of Artificial Sequence: Synthetic polypeptide
LKEAKEKAIEELKKAGITSDYYFDLINKAKTVEGVNALKDEILKA

SEQ ID NO: 245 - protein, 387 aa, Artificial Sequence
  Description of Artificial Sequence: Synthetic polypeptide
MKLNKKLLMAALAGAIVVGGGVNTFAADEPGAIKVDKAPEAPSQELKLTKEEAEKALKKEKPIAKERLRRLGITSEFILNQIDKATSREGLESLVQTIKQSYLKDHPIKEEKTEETPKYNNLFDKHELGGLGKDKGPGRFDENGWENNEHGYETRENAEKAAVKALGDKEINKSYTISQGVDGRYYYVLSREEAETPKKPEEKKPEDKRPKMTIDQWLLKNAKEDAIAELKKAGITSDFYFNAINKAKTVEEVNALKNEILKAHAGKEVNPSTPEVTPSVPQNHYHENDYANIGAGEGTKEDGKKENSKEGIKRKTAREEKPGKEEKPAKEDKKENKKKENTDSPNKKKKEKAALPEAGRRKAEILTLAAASLSSVAGAFISLKKRK

SEQ ID NO: 246 - protein, 8 aa, Artificial Sequence
  Description of Artificial Sequence: Synthetic peptide
DYKDEGGS

SEQ ID NO: 247 - protein, 20 aa, Artificial Sequence
  Description of Artificial Sequence: Synthetic peptide
METDTLLLWVLLLWVPGSTG

SEQ ID NO: 248 - protein, 6 aa, Artificial Sequence
  Description of Artificial Sequence: Synthetic 6xHis tag
HHHHHH

SEQ ID NO: 249 - protein, 11 aa, Artificial Sequence
  Description of Artificial Sequence: Synthetic peptide
CYRKKRRQRRR

SEQ ID NO: 250 - protein, 29 aa, Artificial Sequence
  Description of Artificial Sequence: Synthetic peptide
PFVIGAGVLGALGTGIGGIGRKKRRQRRR

SEQ ID NO: 251 - protein, 8 aa, Artificial Sequence
  Description of Artificial Sequence: Synthetic peptide
RRRRRRRR

SEQ ID NO: 252 - protein, 16 aa, Artificial Sequence
  Description of Artificial Sequence: Synthetic peptide
RQIKIWFQNRRMKWKK

SEQ ID NO: 253 - protein, 17 aa, Artificial Sequence
  Description of Artificial Sequence: Synthetic peptide
FFLIPKGGRKKRRQRRR

SEQ ID NO: 254 - protein, 15 aa, Artificial Sequence
  Description of Artificial Sequence: Synthetic peptide
FFLIPKGRRRRRRRR

SEQ ID NO: 255 - protein, 22 aa, Artificial Sequence
  Description of Artificial Sequence: Synthetic peptide
FFLIPKGRRRRNRTRRNRRRVR

SEQ ID NO: 256 - protein, 23 aa, Artificial Sequence
  Description of Artificial Sequence: Synthetic peptide
FFLIPKGRQIKIWFQNRRMKWKK

SEQ ID NO: 257 - protein, 6 aa, Artificial Sequence
  Description of Artificial Sequence: Synthetic peptide
FFRRRR

SEQ ID NO: 258 - protein, 55 aa, Artificial Sequence
  Description of Artificial Sequence: Synthetic polypeptide
KAVLGATKIDLPVDINDPYDLGLLLRHLRHHSNLLANIGDPAVREQVLSAMQEEE

SEQ ID NO: 259 - protein, 28 aa, Artificial Sequence
  Description of Artificial Sequence: Synthetic peptide
LSTAADMQGVVTDGMASGLDKDYLKPDD

SEQ ID NO: 260 - protein, 15 aa, Artificial Sequence
  Description of Artificial Sequence: Synthetic peptide
RRWRRWNRFNRRRCR

SEQ ID NO: 261 - protein, 17 aa, Artificial Sequence
  Description of Artificial Sequence: Synthetic peptide
RAGLQFPVGRLLRRLLR

SEQ ID NO: 262 - protein, 13 aa, Artificial Sequence
  Description of Artificial Sequence: Synthetic peptide
KRAHHNALERKRR

SEQ ID NO: 263 - protein, 13 aa, Artificial Sequence
  Description of Artificial Sequence: Synthetic peptide
RRMKANARERNRM

SEQ ID NO: 264 - protein, 18 aa, Artificial Sequence
  Description of Artificial Sequence: Synthetic peptide
LLIILRRRIRKQAHAHSK

SEQ ID NO: 265 - protein, 10 aa, Artificial Sequence
  Description of Artificial Sequence: Synthetic peptide
RRLSYSRRRF

SEQ ID NO: 266 - protein, 19 aa, Artificial Sequence
  Description of Artificial Sequence: Synthetic peptide
VKRGLKLRHVRPRVTRMDV

SEQ ID NO: 267 - protein, 17 aa, Artificial Sequence
  Description of Artificial Sequence: Synthetic peptide
CSIPPEVKFNKPFVYLI

SEQ ID NO: 268 - protein, 27 aa, Artificial Sequence
  Description of Artificial Sequence: Synthetic peptide
GWTLNSAGYLLGKINLKALAALAKKIL

SEQ ID NO: 269 - protein, 17 aa, Artificial Sequence
  Description of Artificial Sequence: Synthetic peptide
KGEGAAVLLPVLLAAPG

SEQ ID NO: 270 - protein, 22 aa, Artificial Sequence
  Description of Artificial Sequence: Synthetic peptide
KCFQWQRNMRKVRGPPVSCIKR

SEQ ID NO: 271 - protein, 6 aa, Artificial Sequence
  Description of Artificial Sequence: Synthetic peptide
PFVYLI

SEQ ID NO: 272 - protein, 12 aa, Artificial Sequence
  Description of Artificial Sequence: Synthetic peptide
VLDSLEFIASKL

SEQ ID NO: 273 - protein, 11 aa, Artificial Sequence
  Description of Artificial Sequence: Synthetic peptide
RRRQRRKKRGY

SEQ ID NO: 274 - protein, 7 aa, Artificial Sequence
  Description of Artificial Sequence: Synthetic peptide
  MOD_RES (2)..(2): l-2-naphthylalanine
FARRRRQ

SEQ ID NO: 275 - protein, 10 aa, Artificial Sequence
  Description of Artificial Sequence: Synthetic peptide
  SITE (1)..(10): This sequence may encompass 1-10 residues
RRRRRRRRRR

SEQ ID NO: 276 - protein, 11 aa, Artificial Sequence
  Description of Artificial Sequence: Synthetic peptide
YGRKKRRQRRR

SEQ ID NO: 277 - protein, 10 aa, Artificial Sequence
  Description of Artificial Sequence: Synthetic peptide
GRKKRRQRRR

SEQ ID NO: 278 - protein, 12 aa, Artificial Sequence
  Description of Artificial Sequence: Synthetic peptide
GRKKRRQRRRPQ

SEQ ID NO: 279 - protein, 16 aa, Artificial Sequence
  Description of Artificial Sequence: Synthetic peptide
RKKRRRESRKKRRRES

SEQ ID NO: 280 - protein, 18 aa, Artificial Sequence
  Description of Artificial Sequence: Synthetic peptide
RKGFYKRKQCKPSRGRKR

SEQ ID NO: 281 - protein, 34 aa, Artificial Sequence
  Description of Artificial Sequence: Synthetic polypeptide
NAATATRGRSAASRPTQRPRAPARSASRPRRPVQ

SEQ ID NO: 282 - protein, 21 aa, Artificial Sequence
  Description of Artificial Sequence: Synthetic peptide
AGYLLGKINLKALAALAKKIL

SEQ ID NO: 283 - protein, 18 aa, Artificial Sequence
  Description of Artificial Sequence: Synthetic peptide
KLALKLALKALKAALKLA

SEQ ID NO: 284 - protein, 28 aa, Artificial Sequence
  Description of Artificial Sequence: Synthetic peptide
MVKSKIGSWILVLFVAMWSDVGLCKKRP

SEQ ID NO: 285 - protein, 22 aa, Artificial Sequence
  Description of Artificial Sequence: Synthetic peptide
MVRRFLVTLRIRRACGPPRVRV

SEQ ID NO: 286 - protein, 30 aa, Artificial Sequence
  Description of Artificial Sequence: Synthetic polypeptide
WEAALAEALAEALAEHLAEALAEALEALAA

SEQ ID NO: 287 - protein, 18 aa, Artificial Sequence
  Description of Artificial Sequence: Synthetic peptide
VRLPPPVRLPPPVRLPPP

SEQ ID NO: 288 - protein, 27 aa, Artificial Sequence
  Description of Artificial Sequence: Synthetic peptide
GLAFLGFLGAAGSTMGAWSQPKKKRKV

SEQ ID NO: 289 - protein, 21 aa, Artificial Sequence
  Description of Artificial Sequence: Synthetic peptide
KETWWETWWTEWSQPKKKRKV

SEQ ID NO: 290 - protein, 8 aa, Artificial Sequence
  Description of Artificial Sequence: Synthetic peptide
WRWRWRWR

SEQ ID NO: 291 - protein, 23 aa, Artificial Sequence
  Description of Artificial Sequence: Synthetic peptide
MGLGLHLLVLAAALQGAKKKRKV

SEQ ID NO: 292 - protein, 17 aa, Artificial Sequence
  Description of Artificial Sequence: Synthetic peptide
AAVALLPAVLLAHLLAP

SEQ ID NO: 293 - protein, 26 aa, Artificial Sequence
  Description of Artificial Sequence: Synthetic peptide
GIGAVLKVLTTGLPALISWIKRKRQQ

SEQ ID NO: 294 - protein, 20 aa, Artificial Sequence
  Description of Artificial Sequence: Synthetic peptide
HGLASTLTRWAHYNALIRAF

SEQ ID NO: 295 - protein, 13 aa, Artificial Sequence
  Description of Artificial Sequence: Synthetic peptide
GRKKRRQRRRPPQ

SEQ ID NO: 296 - protein, 27 aa, Artificial Sequence
  Description of Artificial Sequence: Synthetic peptide
GALFLGFLGAAGSTMGAWSQPKKKRKV

SEQ ID NO: 297 - protein, 9 aa, Artificial Sequence
  Description of Artificial Sequence: Synthetic peptide
RRWWRRWRR

SEQ ID NO: 298 - protein, 13 aa, Artificial Sequence
  Description of Artificial Sequence: Synthetic peptide
CGYGPKKKRKVGG

SEQ ID NO: 299 - protein, 8 aa, Artificial Sequence
  Description of Artificial Sequence: Synthetic peptide
KKKKKKKK

SEQ ID NO: 300 - protein, 10 aa, Artificial Sequence
  Description of Artificial Sequence: Synthetic peptide
RRIPNRRPRR

SEQ ID NO: 301 - protein, 5 aa, Artificial Sequence
  Description of Artificial Sequence: Synthetic peptide
RLRWR

SEQ ID NO: 302 - protein, 20 aa, Artificial Sequence
  Description of Artificial Sequence: Synthetic peptide
KETWWETWWTEWSQPKKRKV

SEQ ID NO: 303 - protein, 18 aa, Artificial Sequence
  Description of Artificial Sequence: Synthetic peptide
QLALQLALQALQAALQLA

SEQ ID NO: 304 - protein, 26 aa, Artificial Sequence
  Description of Artificial Sequence: Synthetic peptide
DPKGDPKGVTVTVTVTVTGKGDPKPD

SEQ ID NO: 305 - protein, 24 aa, Artificial Sequence
  Description of Artificial Sequence: Synthetic peptide
RRIRPRPPRLPRPRPRPLPFPRPG

SEQ ID NO: 306 - protein, 9 aa, Artificial Sequence
  Description of Artificial Sequence: Synthetic peptide
PPRPPRPPR

SEQ ID NO: 307 - protein, 12 aa, Artificial Sequence
  Description of Artificial Sequence: Synthetic peptide
PPRPPRPPRPPR

SEQ ID NO: 308 - protein, 15 aa, Artificial Sequence
  Description of Artificial Sequence: Synthetic peptide
PPRPPRPPRPPRPPR

SEQ ID NO: 309 - protein, 18 aa, Artificial Sequence
  Description of Artificial Sequence: Synthetic peptide
PPRPPRPPRPPRPPRPPR

SEQ ID NO: 310 - protein, 24 aa, Artificial Sequence
  Description of Artificial Sequence: Synthetic peptide
GLFEAIEGFIENGWEGMIDGWYGC

SEQ ID NO: 311 - protein, 20 aa, Artificial Sequence
  Description of Artificial Sequence: Synthetic peptide
GLWRALWRLLRSLWRLLWRA

SEQ ID NO: 312 - protein, 15 aa, Artificial Sequence
  Description of Artificial Sequence: Synthetic peptide
SDLWEMMMVSLACQY

SEQ ID NO: 313 - protein, 12 aa, Artificial Sequence
  Description of Artificial Sequence: Synthetic peptide
TGNYKALHPHNG

SEQ ID NO: 314 - protein, 5 aa, Artificial Sequence
  Description of Artificial Sequence: Synthetic peptide
VPMLK

SEQ ID NO: 315 - protein, 14 aa, Artificial Sequence
  Description of Artificial Sequence: Synthetic peptide
RRRRRRGGRRRRRG

SEQ ID NO: 316 - protein, 19 aa, Artificial Sequence
  Description of Artificial Sequence: Synthetic peptide
KVKVKVKVDPPTKVKVKVK

SEQ ID NO: 317 - protein, 13 aa, Artificial Sequence
  Description of Artificial Sequence: Synthetic peptide
LAGRRRRRRRRRK

SEQ ID NO: 318 - protein, 15 aa, Artificial Sequence
  Description of Artificial Sequence: Synthetic peptide
RLWMRWYSPRTRAYG

SEQ ID NO: 319 - protein, 36 aa, Artificial Sequence
  Description of Artificial Sequence: Synthetic polypeptide
KKKKKKKKKKKKKKKKLRVRLASHLRKLRKRLLRDA

SEQ ID NO: 320 - protein, 19 aa, Artificial Sequence
  Description of Artificial Sequence: Synthetic peptide
TFFYGGSRGKRNNFKTEEY

SEQ ID NO: 321 - protein, 23 aa, Artificial Sequence
  Description of Artificial Sequence: Synthetic peptide
EEEEEEEEPLGLAGRRRRRRRRN

SEQ ID NO: 322 - protein, 23 aa, Artificial Sequence
  Description of Artificial Sequence: Synthetic peptide
KAFAKLAARLYRKALARQLGVAA

SEQ ID NO: 323 - protein, 24 aa, Artificial Sequence
  Description of Artificial Sequence: Synthetic peptide
LGTYTQDFNKFHTFPQTAIGVGAP

SEQ ID NO: 324 - protein, 34 aa, Artificial Sequence
  Description of Artificial Sequence: Synthetic polypeptide
DAATATRGRSAASRPTQRPRAPARSASRPRRPVE

SEQ ID NO: 325 - protein, 27 aa, Artificial Sequence
  Description of Artificial Sequence: Synthetic peptide
GALFLGFLGAAGSTMGAWSQPKSKRKV

SEQ ID NO: 326 - protein, 16 aa, Artificial Sequence
  Description of Artificial Sequence: Synthetic peptide
KPKRKRRKKKGHGWSR

SEQ ID NO: 327 - protein, 7 aa, Artificial Sequence
  Description of Artificial Sequence: Synthetic peptide
SGTQEEY

SEQ ID NO: 328 - protein, 13 aa, Artificial Sequence
  Description of Artificial Sequence: Synthetic peptide
RRRRRGGRRRRRG

SEQ ID NO: 329 - protein, 18 aa, Artificial Sequence
  Description of Artificial Sequence: Synthetic peptide
KWKLFKKIGAVLKVLTTG

SEQ ID NO: 330 - protein, 11 aa, Artificial Sequence
  Description of Artificial Sequence: Synthetic peptide
YARAAARQARA

SEQ ID NO: 331 - protein, 68 aa, Artificial Sequence
  Description of Artificial Sequence: Synthetic polypeptide
MKYFTLALTLLFLLLINPCKDMNFAWAESSEKVERASPQQAKYCYEQCNVNKVPFDQCYQMCSPLERS

SEQ ID NO: 332 - protein, 33 aa, Artificial Sequence
  Description of Artificial Sequence: Synthetic polypeptide
GDCLPHLKLCKENKDCCSKKCKRRGTNIEKRCR

SEQ ID NO: 333 - protein, 33 aa, Artificial Sequence
  Description of Artificial Sequence: Synthetic polypeptide
GDCLPHLKRCKADNDCCGKKCKRRGTNAEKRCR

SEQ ID NO: 334 - protein, 35 aa, Artificial Sequence
  Description of Artificial Sequence: Synthetic polypeptide
SEKDCIKHLQRCRENKDCCSKKCSRRGTNPEKRCR

SEQ ID NO: 335 - protein, 33 aa, Artificial Sequence
  Description of Artificial Sequence: Synthetic polypeptide
GDCLPHLKLCKADKDCCSKKCKRRGTNPEKRCR

SEQ ID NO: 336 - protein, 33 aa, Artificial Sequence
  Description of Artificial Sequence: Synthetic polypeptide
GDCLPHLKRCKENNDCCSKKCKRRGTNPEKRCR

SEQ ID NO: 337 - protein, 33 aa, Artificial Sequence
  Description of Artificial Sequence: Synthetic polypeptide
GDCLPHLKRCKENNDCCSKKCKRRGANPEKRCR

SEQ ID NO: 338 - protein, 43 aa, Artificial Sequence
  Description of Artificial Sequence: Synthetic polypeptide
CKYKFENWGACDGGTGTKVRQGTLKKARYNAQCQETIRVTKPC

SEQ ID NO: 339 - protein, 34 aa, Artificial Sequence
  Description of Artificial Sequence: Synthetic polypeptide
SGSDGGVCPKILKKCRRDSDCPGACICRGNGYCG

SEQ ID NO: 340 - protein, 36 aa, Artificial Sequence
  Description of Artificial Sequence: Synthetic polypeptide
MCMPCFTTDHQMARKCDDCCGGKGRGKCYGPQCLCR

SEQ ID NO: 341 - protein, 6 aa, Artificial Sequence
  Description of Artificial Sequence: Synthetic peptide
MLICLF

SEQ ID NO: 342 - protein, 324 aa, Artificial Sequence
  Description of Artificial Sequence: Synthetic polypeptide
METDTLLLWVLLLWVPGSTGDYKDEGGSEEDCKVHCVKEWMAGKACAERDKSYTIGRAHCSGQKFDVFKCLDHCAAPGGGGSGGGGSGGGGSEPKSSDKTHTCPPCPAPELLGGPSVFLFPPKPKDTLMISRTPEVTCVVVDVSHEDPEVKFNWYVDGVEVHNAKTKPREEQYASTYRVVSVLTVLHQDWLNGKEYKCKVSNKALGAPIEKTISKAKGQPREPQVYTLPPSRDELTKNQVSLSCAVKGFYPSDIAVEWESNGQPENNYKTTPPVLDSDGSFFLVSKLTVDKSRWQQGNVFSCSVMHEALHNHYTQKSLSLSPGK

SEQ ID NO: 343 - protein, 115 aa, Artificial Sequence
  Description of Artificial Sequence: Synthetic polypeptide
EVQLVQSGAEVKKPGASVKMSCKASGYTFTSYVMHWVKQAPGQRLEWIGYVNPFNDGTKYNEMFKGRATLTSDKSTSTAYMELSSLRSEDTAVYYCARQAWGYPWGQGTLVTVSS

SEQ ID NO: 344 - protein, 111 aa, Artificial Sequence
  Description of Artificial Sequence: Synthetic polypeptide
DIVLTQSPATLSLSPGERATLSCRATESVEYYGTSLVQWYQQKPGQPPKLLIYAASSVDSGVPSRFSGSGSGTDFTLTINSLEAEDAATYFCQQSRRVPYTFGQGTKLEIK

SEQ ID NO: 345 - protein, 241 aa, Artificial Sequence
  Description of Artificial Sequence: Synthetic polypeptide
DIVLTQSPATLSLSPGERATLSCRATESVEYYGTSLVQWYQQKPGQPPKLLIYAASSVDSGVPSRFSGSGSGTDFTLTINSLEAEDAATYFCQQSRRVPYTFGQGTKLEIKGGGGSGGGGSGGGGSEVQLVQSGAEVKKPGASVKMSCKASGYTFTSYVMHWVKQAPGQRLEWIGYVNPFNDGTKYNEMFKGRATLTSDKSTSTAYMELSSLRSEDTAVYYCARQAWGYPWGQGTLVTVSS

SEQ ID NO: 346 - protein, 506 aa, Artificial Sequence
  Description of Artificial Sequence: Synthetic polypeptide
METDTLLLWVLLLWVPGSTGDYKDEGGSDIVLTQSPATLSLSPGERATLSCRATESVEYYGTSLVQWYQQKPGQPPKLLIYAASSVDSGVPSRFSGSGSGTDFTLTINSLEAEDAATYFCQQSRRVPYTFGQGTKLEIKGGGGSGGGGSGGGGSEVQLVQSGAEVKKPGASVKMSCKASGYTFTSYVMHWVKQAPGQRLEWIGYVNPFNDGTKYNEMFKGRATLTSDKSTSTAYMELSSLRSEDTAVYYCARQAWGYPWGQGTLVTVSSGGGGSEPKSSDKTHTCPPCPAPELLGGPSVFLFPPKPKDTLMISRTPEVTCVVVDVSHEDPEVKFNWYVDGVEVHNAKTKPREEQYASTYRVVSVLTVLHQDWLNGKEYKCKVSNKALGAPIEKTISKAKGQPREPQVYTLPPSRDELTKNQVSLSCAVKGFYPSDIAVEWESNGQPENNYKTTPPVLDSDGSFFLVSKLTVDKSRWQQGNVFSCSVMHEALHNHYTQKSLSLSPGK

SEQ ID NO: 347 - protein, 517 aa, Artificial Sequence
  Description of Artificial Sequence: Synthetic polypeptide
METDTLLLWVLLLWVPGSTGEVQLVESGGGLVQPGGSLKLSCAASGFTFNKYAMNWVRQAPGKGLEWVARIRSKYNNYATYYADSVKDRFTISRDDSKNTAYLQMNNLKTEDTAVYYCVRHGNFGNSYISYWAYWGQGTLVTVSSGGGGSGGGGSGGGGSQTVVTQEPSLTVSPGGTVTLTCGSSTGAVTSGNYPNWVQQKPGQAPRGLIGGTKFLAPGTPARFSGSLLGGKAALTLSGVQPEDEAEYYCVLWYSNRWVFGGGTKLTVLGGGGSEPKSSDKTHTCPPCPAPELLGGPSVFLFPPKPKDTLMISRTPEVTCVVVDVSHEDPEVKFNWYVDGVEVHNAKTKPREEQYASTYRVVSVLTVLHQDWLNGKEYKCKVSNKALGAPIEKTISKAKGQPREPQVYTLPPSRDELTKNQVSLWCLVKGFYPSDIAVEWESNGQPENNYKTTPPVLDSDGSFFLYSKLTVDKSRWQQGNVFSCSVMHEALHNHYTQKSLSLSPGKGGGGSHHHHHH

SEQ ID NO: 348 - protein, 240 aa, Artificial Sequence
  Description of Artificial Sequence: Synthetic polypeptide
EVQLVESGGGLVQPGGSLRLSCAASGFTFSDSWIHWVRQAPGKGLEWVAWISPYGGSTYYADSVKGRFTISADTSKNTAYLQMNSLRAEDTAVYYCARRHWPGGFDYWGQGTLVTVSSGGGGSGGGGSGGGGSDIQMTQSPSSLSASVGDRVTITCRASQDVSTAVAWYQQKPGKAPKLLIYSASFLYSGVPSRFSGSGSGTDFTLTISSLQPEDFATYYCQQYLYHPATFGQGTKVEIK

SEQ ID NO: 349 - protein, 288 aa, Artificial Sequence
  Description of Artificial Sequence: Synthetic polypeptide
MQIPQAPWPVVWAVLQLGWRPGWFLDSPDRPWNPPTFSPALLVVTEGDNATFTCSFSNTSESFVLNWYRMSPSNQTDKLAAFPEDRSQPGQDCRFRVTQLPNGRDFHMSVVRARRNDSGTYLCGAISLAPKAQIKESLRAELRVTERRAEVPTAHPSPSPRPAGQFQTLVVGVVGGLLGSLVLLVWVLAVICSRAARGTIGARRTGQPLKEDPSAVPVFSVDYGELDFQWREKTPEPPVPCVPEQTEYATIVFPSGMGTSSPARRGSADGPRSAQPLRPEDGHCSWPL

SEQ ID NO: 350 - protein, 49 aa, Artificial Sequence
  Description of Artificial Sequence: Synthetic polypeptide
REGCASRCMKYNDELEKCEARMMSMSNTEEDCEQELEDLLYCLDHCHSQ

SEQ ID NO: 351 - protein, 49 aa, Artificial Sequence
  Description of Artificial Sequence: Synthetic polypeptide
REGCASHCTKYKAELEKCEARVSSRSNTEETCVQELFDFLHCVDHCVSQ

SEQ ID NO: 352 - protein, 51 aa, Artificial Sequence
  Description of Artificial Sequence: Synthetic polypeptide
GSREGCASHCTKYKAELEKCEARVSSRSNTEETCVQELFDFLHCVDHCVSQ

SEQ ID NO: 353 - protein, 49 aa, Artificial Sequence
  Description of Artificial Sequence: Synthetic polypeptide
EEDCKVHCVKEWAAYKACAERIKSDTTGQAHCSGQYFDFWKCVDHCAAP

SEQ ID NO: 354 - protein, 51 aa, Artificial Sequence
  Description of Artificial Sequence: Synthetic polypeptide
GSEEDCKVHCVKEWAAYKACAERIKSDTTGQAHCSGQYFDFWKCVDHCAAP

SEQ ID NO: 355 - protein, 49 aa, Artificial Sequence
  Description of Artificial Sequence: Synthetic polypeptide
EESCKPQCVKAWLEYQACAERVEKDESGEAHCTGQYFDYWHCVDKCAAK

SEQ ID NO: 356 - protein, 48 aa, Artificial Sequence
  Description of Artificial Sequence: Synthetic polypeptide
ARTCESQSHRFKGPCVSDTNCASVCRTERFSGGHCRGFRRRCLCTKHC

SEQ ID NO: 357 - protein, 49 aa, Artificial Sequence
  Description of Artificial Sequence: Synthetic polypeptide
EERCKPQCVKSLYEYEKCVKRVENDDTGHKHCTGQYFDYWSCIDKCVAS

SEQ ID NO: 358 - protein, 49 aa, Artificial Sequence
  Description of Artificial Sequence: Synthetic polypeptide
  MOD_RES (1)..(1): E, M, V, or W
  MOD_RES (2)..(2): G, E, L, or F
  MOD_RES (3)..(3): D, E, or S
  MOD_RES (5)..(5): K, R, or V
  MOD_RES (6)..(6): E, Q, S, M, L, or V
  MOD_RES (7)..(7): D, E, H, K, R, N, Q, S, or Y
  MOD_RES (9)..(9): D, M, or V
  MOD_RES (10)..(10): A, K, R, Q, S, or T
  MOD_RES (11)..(11): A, D, E, H, Q, S, T, M, I, L, V, or W
  MOD_RES (12)..(12): A, E, R, Q, S, T, W, or P
  MOD_RES (13)..(13): A, E, K, R, N, Q, T, M, I, L, V, or W
  MOD_RES (14)..(14): G, A, E, K, N, T, or Y
  MOD_RES (15)..(15): G, A, D, E, H, K, R, N, Q, S, T, M, I, L, V, W, Y, or P
  MOD_RES (16)..(16): D, K, R, N, L, or V
  MOD_RES (17)..(17): G, A, D, T, L, W, or P
  MOD_RES (19)..(19): G, A, E, H, K, N, S, F, or P
  MOD_RES (20)..(20): G, A, D, E, N, or P
  MOD_RES (21)..(21): G, D, H, K, R, N, Q, S, T, V, or Y
  MOD_RES (22)..(22): G, D, E, H, K, N, Q, S, T, M, I, F, W, Y, or P
  MOD_RES (23)..(23): G, A, D, E, H, K, R, N, Q, S, Y, or P
  MOD_RES (24)..(24): G, A, D, H, N, Q, S, V, F, or P
  MOD_RES (25)..(25): A, D, H, N, Q, S, T, M, I, V, Y, or P
  MOD_RES (26)..(26): G, A, D, K, R, T, W, or Y
  MOD_RES (27)..(27): G, A, E, N, Q, T, I, V, or P
  MOD_RES (28)..(28): G, D, N, Q, T, L, V, F, or P
  MOD_RES (29)..(29): G, A, E, K, R, N, Q, S, T, I, Y, or P
  MOD_RES (30)..(30): A, D, N, or I
  MOD_RES (31)..(31): G, D, E, H, N, F, or W
  MOD_RES (33)..(33): G, A, E, N, S, Y, or P
  MOD_RES (34)..(34): G, M, or L
  MOD_RES (35)..(35): G, A, D, K, N, Q, or W
  MOD_RES (36)..(36): D, E, H, K, N, Q, S, T, L, V, F, Y, or P
  MOD_RES (37)..(37): G, E, Q, or F
  MOD_RES (38)..(38): D or K
  MOD_RES (39)..(39): G, V, or P
  MOD_RES (40)..(40): G, H, R, V, F, W, or P
  MOD_RES (41)..(41): A, D, or K
  MOD_RES (43)..(43): E, H, Q, L, or F
  MOD_RES (44)..(44): D, E, R, S, T, M, L, or F
  MOD_RES (45)..(45): G, A, D, E, H, K, R, M, L, or P
  MOD_RES (47)..(47): G, A, K, S, I, or L
  MOD_RES (48)..(48): G, A, D, E, R, Q, T, or F
  MOD_RES (49)..(49): A, H, N, Q, S, F, or P
XXXCXXXCXXXXXXXXXCXXXXXXXXXXXXXCXXXXXXXXXCXXXCXXX

SEQ ID NO: 359 - protein, 49 aa, Artificial Sequence
  Description of Artificial Sequence: Synthetic polypeptide
  MOD_RES (7)..(7): Any non-cysteine amino acid
  MOD_RES (10)..(10): Any non-cysteine amino acid
  MOD_RES (11)..(11): Any non-cysteine amino acid
  MOD_RES (12)..(12): Any non-cysteine amino acid
  MOD_RES (13)..(13): Any non-cysteine amino acid
  MOD_RES (14)..(14): M, I, L, or V
  MOD_RES (15)..(15): Y, A, H, K, R, N, Q, S, or T
  MOD_RES (17)..(17): Any non-cysteine amino acid
  MOD_RES (19)..(19): Any non-cysteine amino acid
  MOD_RES (21)..(21): Any non-cysteine amino acid
  MOD_RES (22)..(22): D, E, N, Q, or P
  MOD_RES (23)..(23): Any non-cysteine amino acid
  MOD_RES (24)..(24): Any non-cysteine amino acid
  MOD_RES (25)..(25): Any non-cysteine amino acid
  MOD_RES (26)..(26): Any non-cysteine amino acid
  MOD_RES (27)..(27): Any non-cysteine amino acid
  MOD_RES (28)..(28): Any non-cysteine amino acid
  MOD_RES (29)..(29): Any non-cysteine amino acid
  MOD_RES (31)..(31): Any non-cysteine amino acid
  MOD_RES (33)..(33): Any non-cysteine amino acid
  MOD_RES (35)..(35): Any non-cysteine amino acid
  MOD_RES (36)..(36): K or P
  MOD_RES (38)..(38): D or K
  MOD_RES (41)..(41): D or K
  MOD_RES (44)..(44): Any non-cysteine amino acid
  MOD_RES (45)..(45): Any non-cysteine amino acid
  MOD_RES (47)..(47): Any non-cysteine amino acid
  MOD_RES (48)..(48): Any non-cysteine amino acid
  MOD_RES (49)..(49): Any non-cysteine amino acid
EEDCKVXCVXXXXXXKXCXEXXXXXXXXXAXCXGXXFXVFXCLXXCXXX

SEQ ID NO: 360 - protein, 15 aa, Artificial Sequence
  Description of Artificial Sequence: Synthetic peptide
  MOD_RES (2)..(2): K, R, or V
  MOD_RES (3)..(3): E, Q, S, M, L, or V
  MOD_RES (4)..(4): D, E, H, K, R, N, Q, S, or Y
  MOD_RES (6)..(6): D, M, or V
  MOD_RES (7)..(7): A, K, R, Q, S, or T
  MOD_RES (8)..(8): A, D, E, H, Q, S, T, M, I, L, V, or W
  MOD_RES (9)..(9): A, E, R, Q, S, T, W, or P
  MOD_RES (10)..(10): A, E, K, R, N, Q, T, M, I, L, V, or W
  MOD_RES (11)..(11): G, A, E, K, N, T, or Y
  MOD_RES (12)..(12): G, A, D, E, H, K, R, N, Q, S, T, M, I, L, V, W, Y, or P
  MOD_RES (13)..(13): D, K, R, N, L, or V
  MOD_RES (14)..(14): G, A, D, T, L, W, or P
CXXXCXXXXXXXXXC

SEQ ID NO: 361 - protein, 11 aa, Artificial Sequence
  Description of Artificial Sequence: Synthetic peptide
  MOD_RES (1)..(1): D, E, H, K, N, Q, S, T, L, V, F, Y, or P
  MOD_RES (2)..(2): G, E, Q, or F
  MOD_RES (3)..(3): D or K
  MOD_RES (4)..(4): G, V, or P
  MOD_RES (5)..(5): G, H, R, V, F, W, or P
  MOD_RES (6)..(6): A, D, or K
  MOD_RES (8)..(8): E, H, Q, L, or F
  MOD_RES (9)..(9): D, E, R, S, T, M, L, or F
  MOD_RES (10)..(10): G, A, D, E, H, K, R, M, L, or P
XXXXXXCXXXC

SEQ ID NO: 362 - protein, 15 aa, Artificial Sequence
  Description of Artificial Sequence: Synthetic peptide
  MOD_RES (4)..(4): Any non-cysteine amino acid
  MOD_RES (7)..(7): Any non-cysteine amino acid
  MOD_RES (8)..(8): Any non-cysteine amino acid
  MOD_RES (9)..(9): Any non-cysteine amino acid
  MOD_RES (10)..(10): Any non-cysteine amino acid
  MOD_RES (11)..(11): M, I, L, or V
  MOD_RES (12)..(12): Y, A, H, K, R, N, Q, S, or T
  MOD_RES (14)..(14): Any non-cysteine amino acid
CKVXCVXXXXXXKXC

SEQ ID NO: 363 - protein, 11 aa, Artificial Sequence
  Description of Artificial Sequence: Synthetic peptide
  MOD_RES (1)..(1): K or P
  MOD_RES (3)..(3): D or K
  MOD_RES (6)..(6): D or K
  MOD_RES (9)..(9): Any non-cysteine amino acid
  MOD_RES (10)..(10): Any non-cysteine amino acid
XFXVFXCLXXC

SEQ ID NO: 364 - protein, 15 aa, Artificial Sequence
  Description of Artificial Sequence: Synthetic peptide
CKVHCVKEWMAGKAC

SEQ ID NO: 365 - protein, 11 aa, Artificial Sequence
  Description of Artificial Sequence: Synthetic peptide
KFDVFKCLDHC

SEQ ID NO: 366 - RNA, 19 nt, Artificial Sequence
  Description of Artificial Sequence: Synthetic oligonucleotide
uccccugccagguaaguau

SEQ ID NO: 367 - RNA, 17 nt, Artificial Sequence
  Description of Artificial Sequence: Synthetic oligonucleotide
cccugccagguaaguau

SEQ ID NO: 368 - RNA, 14 nt, Artificial Sequence
  Description of Artificial Sequence: Synthetic oligonucleotide
ugccagguaaguau

SEQ ID NO: 369 - RNA, 14 nt, Artificial Sequence
  Description of Artificial Sequence: Synthetic oligonucleotide
ugccagguaaguau

SEQ ID NO: 370 - RNA, 13 nt, Artificial Sequence
  Description of Artificial Sequence: Synthetic oligonucleotide
gccagguaaguau

SEQ ID NO: 371 - RNA, 12 nt, Artificial Sequence
  Description of Artificial Sequence: Synthetic oligonucleotide
ccagguaaguau

SEQ ID NO: 372 - RNA, 11 nt, Artificial Sequence
  Description of Artificial Sequence: Synthetic oligonucleotide
cagguaaguau

SEQ ID NO: 373 - RNA, 10 nt, Artificial Sequence
  Description of Artificial Sequence: Synthetic oligonucleotide
cagguaagua

SEQ ID NO: 374 - RNA, 22 nt, Artificial Sequence
  Description of Artificial Sequence: Synthetic oligonucleotide
ucaacaucagucugauaagcua

SEQ ID NO: 375 - RNA, 21 nt, Artificial Sequence
  Description of Artificial Sequence: Synthetic oligonucleotide
caacaucagucugauaagcua

SEQ ID NO: 376 - RNA, 20 nt, Artificial Sequence
  Description of Artificial Sequence: Synthetic oligonucleotide
aacaucagucugauaagcua

SEQ ID NO: 377 - RNA, 19 nt, Artificial Sequence
  Description of Artificial Sequence: Synthetic oligonucleotide
acaucagucugauaagcua

SEQ ID NO: 378 - RNA, 18 nt, Artificial Sequence
  Description of Artificial Sequence: Synthetic oligonucleotide
caucagucugauaagcua

SEQ ID NO: 379 - RNA, 17 nt, Artificial Sequence
  Description of Artificial Sequence: Synthetic oligonucleotide
aucagucugauaagcua

SEQ ID NO: 380 - RNA, 16 nt, Artificial Sequence
  Description of Artificial Sequence: Synthetic oligonucleotide
ucagucugauaagcua

SEQ ID NO: 381 - RNA, 15 nt, Artificial Sequence
  Description of Artificial Sequence: Synthetic oligonucleotide
cagucugauaagcua

SEQ ID NO: 382 - RNA, 33 nt, Artificial Sequence
  Description of Artificial Sequence: Synthetic oligonucleotide
gccguacaguuccacaaagggccagguaaguau

SEQ ID NO: 383 - DNA, 20 bp, Artificial Sequence
  Description of Artificial Sequence: Synthetic oligonucleotide
tgacttgtcaagtcatcctt

SEQ ID NO: 384 - DNA, 20 bp, Artificial Sequence
  Description of Artificial Sequence: Synthetic oligonucleotide
gcaggttaagtgattaacca

SEQ ID NO: 385 - DNA, 20 bp, Artificial Sequence
  Description of Artificial Sequence: Synthetic oligonucleotide
tcctctccacaattattgac

SEQ ID NO: 386 - DNA, 20 bp, Artificial Sequence
  Description of Artificial Sequence: Synthetic oligonucleotide
gacgtatttaggagaggaag

SEQ ID NO: 387 - DNA, 20 bp, Artificial Sequence
  Description of Artificial Sequence: Synthetic oligonucleotide
ctgatactatgcatgtggag

SEQ ID NO: 388 - DNA, 20 bp, Artificial Sequence
  Description of Artificial Sequence: Synthetic oligonucleotide
gccgggtcattattcttttt

SEQ ID NO: 389 - RNA, 21 nt, Artificial Sequence
  Description of Artificial Sequence: Synthetic oligonucleotide
aauauuguguugcuuagugaa

SEQ ID NO: 390 - RNA, 21 nt, Artificial Sequence
  Description of Artificial Sequence: Synthetic oligonucleotide
aauucacuaagcaacacaaua

SEQ ID NO: 391 - RNA, 21 nt, Artificial Sequence
  Description of Artificial Sequence: Synthetic oligonucleotide
aacauguguccaugugaagau

SEQ ID NO: 392 - RNA, 21 nt, Artificial Sequence
  Description of Artificial Sequence: Synthetic oligonucleotide
aaaucuucacauggacacaug

SEQ ID NO: 393 - RNA, 21 nt, Artificial Sequence
  Description of Artificial Sequence: Synthetic oligonucleotide
aaguucagauugcaaggcagc

SEQ ID NO: 394 - RNA, 21 nt, Artificial Sequence
  Description of Artificial Sequence: Synthetic oligonucleotide
aagcugccuugcaaucugaac

SEQ ID NO: 395 - RNA, 21 nt, Artificial Sequence
  Description of Artificial Sequence: Synthetic oligonucleotide
aaccaaguacuucuugccacc

SEQ ID NO: 396 - RNA, 21 nt, Artificial Sequence
  Description of Artificial Sequence: Synthetic oligonucleotide
aagguggcaagaaguacuugg

SEQ ID NO: 397 - RNA, 22 nt, Artificial Sequence
  Description of Artificial Sequence: Synthetic oligonucleotide
uagcuuaucagacugauguuga

SEQ ID NO: 398 - DNA, 2858 bp, Artificial Sequence
  Description of Artificial Sequence: Synthetic polynucleotide
aggcagtgaggaaagaagacatgacacagccaacaagggtggcagcctggctctgaagtggaattatgtgcttcaaacaggttgaaagagggaaacagtcttttcctgcttccagacatgaatcaggtcactattcaatgggatgcagtaatagccctttacatactcttcagctggtgtcatggaggaattacaaatataaactgctctggccacatctgggtagaaccagccacaatttttaagatgggtatgaatatctctatatattgccaagcagcaattaagaactgccaaccaaggaaacttcatttttataaaaatggcatcaaagaaagatttcaaatcacaaggattaataaaacaacagctcggctttggtataaaaactttctggaaccacatgcttctatgtactgcactgctgaatgtcccaaacattttcaagagacactgatatgtggaaaagacatttcttctggatatccgccagatattcctgatgaagtaacctgtgtcatttatgaatattcaggcaacatgacttgcacctggaatgctgggaagctcacctacatagacacaaaatacgtggtacatgtgaagagtttagagacagaagaagagcaacagtatctcacctcaagctatattaacatctccactgattcattacaaggtggcaagaagtacttggtttgggtccaagcagcaaacgcactaggcatggaagagtcaaaacaactgcaaattcacctggatgatatagtgataccttctgcagccgtcatttccagggctgagactataaatgctacagtgcccaagaccataatttattgggatagtcaaacaacaattgaaaaggtttcctgtgaaatgagatacaaggctacaacaaaccaaacttggaatgttaaagaatttgacaccaattttacatatgtgcaacagtcagaattctacttggagccaaacattaagtacgtatttcaagtgagatgtcaagaaacaggcaaaaggtactggcagccttggagttcactgttttttcataaaacacctgaaacagttccccaggtcacatcaaaagcattccaacatgacacatggaattctgggctaacagttgcttccatctctacagggcaccttacttctgacaacagaggagacattggacttttattgggaatgatcgtctttgctgttatgttgtcaattctttctttgattgggatatttaacagatcattccgaactgggattaaaagaaggatcttattgttaataccaaagtggctttatgaagatattcctaatatgaaaaacagcaatgttgtgaaaatgctacaggaaaatagtgaacttatgaataataattccagtgagcaggtcctatatgttgatcccatgattacagagataaaagaaatcttcatcccagaacacaagcctacagactacaagaaggagaatacaggacccctggagacaagagactacccgcaaaactcgctattcgacaatactacagttgtatatattcctgatctcaacactggatataaaccccaaatttcaaattttctgcctgagggaagccatctcagcaataataatgaaattacttccttaacacttaaaccaccagttgattccttagactcaggaaataatcccaggttacaaaagcatcctaattttgctttttctgtttcaagtgtgaattcactaagcaacacaatatttcttggagaattaagcctcatattaaatcaaggagaatgcagttctcctgacatacaaaactcagtagaggaggaaaccaccatgcttttggaaaatgattcacccagtgaaactattccagaacagaccctgcttcctgatgaatttgtctcctgtttggggatcgtgaatgaggagttgccatctattaatacttattttccacaaaatattttggaaagccacttcaataggatttcactcttggaaaagtagagctgtgtggtcaaaatcaatatgagaaagctgccttgcaatctgaacttgggttttccctgcaatagaaattgaattctgcctctttttgaaaaaaatgtattcacatacaaatcttcacatggacacatgttttcatttcccttggataaatacctaggtaggggattgctgggccatatgataagcatatgtttcagttctaccaatcttgtttccagagtagtgacatttctgtgctcctaccatcaccatgtaagaattcccgggagctccatgcctttttaattttagccattcttctgcctcatttcttaaaattagagaattaaggtcccgaaggtggaacatgcttcatggtcacacatacaggcacaaaaacagcattatgtggacgcctcatgtattttttatagagtcaactatttcctctttattttccctcattgaaagatgcaaaacagctctctattgtgtacagaaagggtaaataatgcaaaatacctggtagtaaaataaatgctgaaaattttcctttaaaatagaatcattaggccaggcgtggtggctcatgcttgtaatcccagcactttggtaggctgaggtaggtggatcacctgaggtcaggagttcgagtccagcctggccaatatgctgaaaccctgtctctactaaaattacaaaaattagccggccatggtggcaggtgcttgtaatcccagctacttgggaggctgaggcaggagaatcacttgaaccaggaaggcagaggttgcactgagctgagattgtgccactgcactccagcctgggcaacaagagcaaaactctgtctggaaaaaaaaaaaaaa

SEQ ID NO: 399 - DNA, 6590 bp, Artificial Sequence
  Description of Artificial Sequence: Synthetic polynucleotide
gcagtcaccgccacccaccagctccggcaccaacagcagcgccgctgccaccgcccaccttctgccgccgccaccacagccaccttctcctcctccgctgtcctctcccgtcctcgcctctgtcgactatcaggtgaactttgaaccaggatggctgagccccgccaggagttcgaagtgatggaagatcacgctgggacgtacgggttgggggacaggaaagatcaggggggctacaccatgcaccaagaccaagagggtgacacggacgctggcctgaaagaatctcccctgcagacccccactgaggacggatctgaggaaccgggctctgaaacctctgatgctaagagcactccaacagcggaagatgtgacagcacccttagtggatgagggagctcccggcaagcaggctgccgcgcagccccacacggagatcccagaaggaaccacagctgaagaagcaggcattggagacacccccagcctggaagacgaagctgctggtcacgtgacccaagagcctgaaagtggtaaggtggtccaggaaggcttcctccgagagccaggccccccaggtctgagccaccagctcatgtccggcatgcctggggctcccctcctgcctgagggccccagagaggccacacgccaaccttcggggacaggacctgaggacacagagggcggccgccacgcccctgagctgctcaagcaccagcttctaggagacctgcaccaggaggggccgccgctgaagggggcagggggcaaagagaggccggggagcaaggaggaggtggatgaagaccgcgacgtcgatgagtcctccccccaagactcccctccctccaaggcctccccagcccaagatgggcggcctccccagacagccgccagagaagccaccagcatcccaggcttcccagcggagggtgccatccccctccctgtggatttcctctccaaagtttccacagagatcccagcctcagagcccgacgggcccagtgtagggcgggccaaagggcaggatgcccccctggagttcacgtttcacgtggaaatcacacccaacgtgcagaaggagcaggcgcactcggaggagcatttgggaagggctgcatttccaggggcccctggagaggggccagaggcccggggcccctctttgggagaggacacaaaagaggctgaccttccagagccctctgaaaagcagcctgctgctgctccgcgggggaagcccgtcagccgggtccctcaactcaaagctcgcatggtcagtaaaagcaaagacgggactggaagcgatgacaaaaaagccaagacatccacacgttcctctgctaaaaccttgaaaaataggccttgccttagccccaaacaccccactcctggtagctcagaccctctgatccaaccctccagccctgctgtgtgcccagagccaccttcctctcctaaatacgtctcttctgtcacttcccgaactggcagttctggagcaaaggagatgaaactcaagggggctgatggtaaaacgaagatcgccacaccgcggggagcagcccctccaggccagaagggccaggccaacgccaccaggattccagcaaaaaccccgcccgctccaaagacaccacccagctctggtgaacctccaaaatcaggggatcgcagcggctacagcagccccggctccccaggcactcccggcagccgctcccgcaccccgtcccttccaaccccacccacccgggagcccaagaaggtggcagtggtccgtactccacccaagtcgccgtcttccgccaagagccgcctgcagacagcccccgtgcccatgccagacctgaagaatgtcaagtccaagatcggctccactgagaacctgaagcaccagccgggaggcgggaaggtgcagataattaataagaagctggatcttagcaacgtccagtccaagtgtggctcaaaggataatatcaaacacgtcccgggaggcggcagtgtgcaaatagtctacaaaccagttgacctgagcaaggtgacctccaagtgtggctcattaggcaacatccatcataaaccaggaggtggccaggtggaagtaaaatctgagaagcttgacttcaaggacagagtccagtcgaagattgggtccctggacaatatcacccacgtccctggcggaggaaataaaaagattgaaacccacaagctgaccttccgcgagaacgccaaagccaagacagaccacggggcggagatcgtgtacaagtcgccagtggtgtctggggacacgtctccacggcatctcagcaatgtctcctccaccggcagcatcgacatggtagactcgccccagctcgccacgctagctgacgaggtgtctgcctccctggccaagcagggtttgtgatcaggcccctggggcggtcaataattgtggagaggagagaatgagagagtgtggaaaaaaaaagaataatgacccggcccccgccctctgcccccagctgctcctcgcagttcggttaattggttaatcacttaacctgcttttgtcactcggctttggctcgggacttcaaaatcagtgatgggagtaagagcaaatttcatctttccaaattgatgggtgggctagtaataaaatatttaaaaaaaaacattcaaaaacatggccacatccaacatttcctcaggcaattccttttgattcttttttcttccccctccatgtagaagagggagaaggagaggctctgaaagctgcttctgggggatttcaagggactgggggtgccaaccacctctggccctgttgtgggggtgtcacagaggcagtggcagcaacaaaggatttgaaacttggtgtgttcgtggagccacaggcagacgatgtcaaccttgtgtgagtgtgacgggggttggggtggggcgggaggccacgggggaggccgaggcaggggctgggcagaggggagaggaagcacaagaagtgggagtgggagaggaagccacgtgctggagagtagacatccccctccttgccgctgggagagccaaggcctatgccacctgcagcgtctgagcggccgcctgtccttggtggccgggggtgggggcctgctgtgggtcagtgtgccaccctctgcagggcagcctgtgggagaagggacagcgggtaaaaagagaaggcaagctggcaggagggtggcacttcgtggatgacctccttagaaaagactgaccttgatgtcttgagagcgctggcctcttcctccctccctgcagggtagggggcctgagttgaggggcttccctctgctccacagaaaccctgttttattgagttctgaaggttggaactgctgccatgattttggccactttgcagacctgggactttagggctaaccagttctctttgtaaggacttgtgcctcttgggagacgtccacccgtttccaagcctgggccactggcatctctggagtgtgtgggggtctgggaggcaggtcccgagccccctgtccttcccacggccactgcagtcaccccgtctgcgccgctgtgctgttgtctgccgtgagagcccaatcactgcctatacccctcatcacacgtcacaatgtcccgaattcccagcctcaccaccccttctcagtaatgaccctggttggttgcaggaggtacctactccatactgagggtgaaattaagggaaggcaaagtccaggcacaagagtgggaccccagcctctcactctcagttccactcatccaactgggaccctcaccacgaatctcatgatctgattcggttccctgtctcctcctcccgtcacagatgtgagccagggcactgctcagctgtgaccctaggtgtttctgccttgttgacatggagagagccctttcccctgagaaggcctggccccttcctgtgctgagcccacagcagcaggctgggtgtcttggttgtcagtggtggcaccaggatggaagggcaaggcacccagggcaggcccacagtcccgctgtcccccacttgcaccctagcttgtagctgccaacctcccagacagcccagcccgctgctcagctccacatgcatagtatcagccctccacacccgacaaaggggaacacacccccttggaaatggttcttttcccccagtcccagctggaagccatgctgtctgttctgctggagcagctgaacatatacatagatgttgccctgccctccccatctgcaccctgttgagttgtagttggatttgtctgtttatgcttggattcaccagagtgactatgatagtgaaaagaaaaaaaaaaaaaaaaaaggacgcatgtatcttgaaatgcttgtaaagaggtttctaacccaccctcacgaggtgtctctcacccccacactgggactcgtgtggcctgtgtggtgccaccctgctggggcctcccaagttttgaaaggctttcctcagcacctgggacccaacagagaccagcttctagcagctaaggaggccgttcagctgtgacgaaggcctgaagcacaggattaggactgaagcgatgatgtccccttccctacttccccttggggctccctgtgtcagggcacagactaggtcttgtggctggtctggcttgcggcgcgaggatggttctctctggtcatagcccgaagtctcatggcagtcccaaaggaggcttacaactcctgcatcacaagaaaaaggaagccactgccagctggggggatctgcagctcccagaagctccgtgagcctcagccacccctcagactgggttcctctccaagctcgccctctggaggggcagcgcagcctcccaccaagggccctgcgaccacagcagggattgggatgaattgcctgtcctggatctgctctagaggcccaagctgcctgcctgaggaaggatgacttgacaagtcaggagacactgttcccaaagccttgaccagagcacctcagcccgctgaccttgcacaaactccatctgctgccatgagaaaagggaagccgcctttgcaaaacattgctgcctaaagaaactcagcagcctcaggcccaattctgccacttctggtttgggtacagttaaaggcaaccctgagggacttggcagtagaaatccagggcctcccctggggctggcagcttcgtgtgcagctagagctttacctgaaaggaagtctctgggcccagaactctccaccaagagcctccctgccgttcgctgagtcccagcaattctcctaagttgaagggatctgagaaggagaaggaaatgtggggtagatttggtggtggttagagatatgcccccctcattactgccaacagtttcggctgcatttcttcacgcacctcggttcctcttcctgaagttcttgtgccctgctcttcagcaccatgggccttcttatacggaaggctctgggatctcccccttgtggggcaggctcttggggccagcctaagatcatggtttagggtgatcagtgctggcagataaattgaaaaggcacgctggcttgtgatcttaaatgaggacaatccccccagggctgggcactcctcccctcccctcacttctcccacctgcagagccagtgtccttgggtgggctagataggatatactgtatgccggctccttcaagctgctgactcactttatcaatagttccatttaaattgacttcagtggtgagactgtatcctgtttgctattgcttgttgtgctatggggggaggggggaggaatgtgtaagatagttaacatgggcaaagggagatcttggggtgcagcacttaaactgcctcgtaacccttttcatgatttcaaccacatttgctagagggagggagcagccacggagttagaggcccttggggtttctcttttccactgacaggctttcccaggcagctggctagttcattccctccccagccaggtgcaggcgtaggaatatggacatctggttgctttggcctgctgccctctttcaggggtcctaagcccacaatcatgcctccctaagaccttggcatccttccctctaagccgttggcacctctgtgccacctctcacactggctccagacacacagcctgtgcttttggagctgagatcactcgcttcaccctcctcatctttgttctccaagtaaagccacgaggtcggggcgagggcagaggtgatcacctgcgtgtcccatctacagacctgcagcttcataaaacttctgatttctcttcagctttgaaaagggttaccctgggcactggcctagagcctcacctcctaatagacttagccccatgagtttgccatgttgagcaggactatttctggcacttgcaagtcccatgatttcttcggtaattctgagggtggggggagggacatgaaatcatcttagcttagctttctgtctgtgaatgtctatatagtgtattgtgtgttttaacaaatgatttacactgactgttgctgtaaaagtgaatttggaaataaagttattactctgattaaa

SEQ ID NO: 400 - DNA, 5639 bp, Artificial Sequence
  Description of Artificial Sequence: Synthetic polynucleotide
gcagtcaccgccacccaccagctccggcaccaacagcagcgccgctgccaccgcccaccttctgccgccgccaccacagccaccttctcctcctccgctgtcctctcccgtcctcgcctctgtcgactatcaggtgaactttgaaccaggatggctgagccccgccaggagttcgaagtgatggaagatcacgctgggacgtacgggttgggggacaggaaagatcaggggggctacaccatgcaccaagaccaagagggtgacacggacgctggcctgaaagaatctcccctgcagacccccactgaggacggatctgaggaaccgggctctgaaacctctgatgctaagagcactccaacagcggaagatgtgacagcacccttagtggatgagggagctcccggcaagcaggctgccgcgcagccccacacggagatcccagaaggaaccacagctgaagaagcaggcattggagacacccccagcctggaagacgaagctgctggtcacgtgacccaagctcgcatggtcagtaaaagcaaagacgggactggaagcgatgacaaaaaagccaagggggctgatggtaaaacgaagatcgccacaccgcggggagcagcccctccaggccagaagggccaggccaacgccaccaggattccagcaaaaaccccgcccgctccaaagacaccacccagctctggtgaacctccaaaatcaggggatcgcagcggctacagcagccccggctccccaggcactcccggcagccgctcccgcaccccgtcccttccaaccccacccacccgggagcccaagaaggtggcagtggtccgtactccacccaagtcgccgtcttccgccaagagccgcctgcagacagcccccgtgcccatgccagacctgaagaatgtcaagtccaagatcggctccactgagaacctgaagcaccagccgggaggcgggaaggtgcagataattaataagaagctggatcttagcaacgtccagtccaagtgtggctcaaaggataatatcaaacacgtcccgggaggcggcagtgtgcaaatagtctacaaaccagttgacctgagcaaggtgacctccaagtgtggctcattaggcaacatccatcataaaccaggaggtggccaggtggaagtaaaatctgagaagcttgacttcaaggacagagtccagtcgaagattgggtccctggacaatatcacccacgtccctggcggaggaaataaaaagattgaaacccacaagctgaccttccgcgagaacgccaaagccaagacagaccacggggcggagatcgtgtacaagtcgccagtggtgtctggggacacgtctccacggcatctcagcaatgtctcctccaccggcagcatcgacatggtagactcgccccagctcgccacgctagctgacgaggtgtctgcctccctggccaagcagggtttgtgatcaggcccctggggcggtcaataattgtggagaggagagaatgagagagtgtggaaaaaaaaagaataatgacccggcccccgccctctgcccccagctgctcctcgcagttcggttaattggttaatcacttaacctgcttttgtcactcggctttggctcgggacttcaaaatcagtgatgggagtaagagcaaatttcatctttccaaattgatgggtgggctagtaataaaatatttaaaaaaaaacattcaaaaacatggccacatccaacatttcctcaggcaattccttttgattcttttttcttccccctccatgtagaagagggagaaggagaggctctgaaagctgcttctgggggatttcaagggactgggggtgccaaccacctctggccctgttgtgggggtgtcacagaggcagtggcagcaacaaaggatttgaaacttggtgtgttcgtggagccacaggcagacgatgtcaaccttgtgtgagtgtgacgggggttggggtggggcgggaggccacgggggaggccgaggcaggggctgggcagaggggagaggaagcacaagaagtgggagtgggagaggaagccacgtgctggagagtagacatccccctccttgccgctgggagagccaaggcctatgccacctgcagcgtctgagcggccgcctgtccttggtggccgggggtgggggcctgctgtgggtcagtgtgccaccctctgcagggcagcctgtgggagaagggacagcgggtaaaaagagaaggcaagctggcaggagggtggcacttcgtggatgacctccttagaaaagactgaccttgatgtcttgagagcgctggcctcttcctccctccctgcagggtagggggcctgagttgaggggcttccctctgctccacagaaaccctgttttattgagttctgaaggttggaactgctgccatgattttggccactttgcagacctgggactttagggctaaccagttctctttgtaaggacttgtgcctcttgggagacgtccacccgtttccaagcctgggccactggcatctctggagtgtgtgggggtctgggaggcaggtcccgagccccctgtccttcccacggccactgcagtcaccccgtctgcgccgctgtgctgttgtctgccgtgagagcccaatcactgcctatacccctcatcacacgtcacaatgtcccgaattcccagcctcaccaccccttctcagtaatgaccctggttggttgcaggaggtacctactccatactgagggtgaaattaagggaaggcaaagtccaggcacaagagtgggaccccagcctctcactctcagttccactcatccaactgggaccctcaccacgaatctcatgatctgattcggttccctgtctcctcctcccgtcacagatgtgagccagggcactgctcagctgtgaccctaggtgtttctgccttgttgacatggagagagccctttcccctgagaaggcctggccccttcctgtgctgagcccacagcagcaggctgggtgtcttggttgtcagtggtggcaccaggatggaagggcaaggcacccagggcaggcccacagtcccgctgtcccccacttgcaccctagcttgtagctgccaacctcccagacagcccagcccgctgctcagctccacatgcatagtatcagccctccacacccgacaaaggggaacacacccccttggaaatggttcttttcccccagtcccagctggaagccatgctgtctgttctgctggagcagctgaacatatacatagatgttgccctgccctccccatctgcaccctgttgagttgtagttggatttgtctgtttatgcttggattcaccagagtgactatgatagtgaaaagaaaaaaaaaaaaaaaaaaggacgcatgtatcttgaaatgcttgtaaagaggtttctaacccaccctcacgaggtgtctctcacccccacactgggactcgtgtggcctgtgtggtgccaccctgctggggcctcccaagttttgaaaggctttcctcagcacctgggacccaacagagaccagcttctagcagctaaggaggccgttcagctgtgacgaaggcctgaagcacaggattaggactgaagcgatgatgtccccttccctacttccccttggggctccctgtgtcagggcacagactaggtcttgtggctggtctggcttgcggcgcgaggatggttctctctggtcatagcccgaagtctcatggcagtcccaaaggaggcttacaactcctgcatcacaagaaaaaggaagccactgccagctggggggatctgcagctcccagaagctccgtgagcctcagccacccctcagactgggttcctctccaagctcgccctctggaggggcagcgcagcctcccaccaagggccctgcgaccacagcagggattgggatgaattgcctgtcctggatctgctctagaggcccaagctgcctgcctgaggaaggatgacttgacaagtcaggagacactgttcccaaagccttgaccagagcacctcagcccgctgaccttgcacaaactccatctgctgccatgagaaaagggaagccgcctttgcaaaacattgctgcctaaagaaactcagcagcctcaggcccaattctgccacttctggtttgggtacagttaaaggcaaccctgagggacttggcagtagaaatccagggcctcccctggggctggcagcttcgtgtgcagctagagctttacctgaaaggaagtctctgggcccagaactctccaccaagagcctccctgccgttcgctgagtcccagcaattctcctaagttgaagggatctgagaaggagaaggaaatgtggggtagatttggtggtggttagagatatgcccccctcattactgccaacagtttcggctgcatttcttcacgcacctcggttcctcttcctgaagttcttgtgccctgctcttcagcaccatgggccttcttatacggaaggctctgggatctcccccttgtggggcaggctcttggggccagcctaagatcatggtttagggtgatcagtgctggcagataaattgaaaaggcacgctggcttgtgatcttaaatgaggacaatccccccagggctgggcactcctcccctcccctcacttctcccacctgcagagccagtgtccttgggtgggctagataggatatactgtatgccggctccttcaagctgctgactcactttatcaatagttccatttaaattgacttcagtggtgagactgtatcctgtttgctattgcttgttgtgctatggggggaggggggaggaatgtgtaagatagttaacatgggcaaagggagatcttggggtgcagcacttaaactgcctcgtaacccttttcatgatttcaaccacatttgctagagggagggagcagccacggagttagaggcccttggggtttctcttttccactgacaggctttcccaggcagctggctagttcattccctccccagccaggtgcaggcgtaggaatatggacatctggttgctttggcctgctgccctctttcaggggtcctaagcccacaatcatgcctccctaagaccttggcatccttccctctaagccgttggcacctctgtgccacctctcacactggctccagacacacagcctgtgcttttggagctgagatcactcgcttcaccctcctcatctttgttctccaagtaaagccacgaggtcggggcgagggcagaggtgatcacctgcgtgtcccatctacagacctgcagcttcataaaacttctgatttctcttcagctttgaaaagggttaccctgggcactggcctagagcctcacctcctaatagacttagccccatgagtttgccatgttgagcaggactatttctggcacttgcaagtcccatgatttcttcggtaattctgagggtggggggagggacatgaaatcatcttagcttagctttctgtctgtgaatgtctatatagtgtattgtgtgttttaacaaatgatttacactgactgttgctgtaaaagtgaatttggaaataaagttattactctgattaaa

SEQ ID NO: 401 - DNA, 5465 bp, Artificial Sequence
  Description of Artificial Sequence: Synthetic polynucleotide
gcagtcaccgccacccaccagctccggcaccaacagcagcgccgctgccaccgcccaccttctgccgccgccaccacagccaccttctcctcctccgctgtcctctcccgtcctcgcctctgtcgactatcaggtgaactttgaaccaggatggctgagccccgccaggagttcgaagtgatggaagatcacgctgggacgtacgggttgggggacaggaaagatcaggggggctacaccatgcaccaagaccaagagggtgacacggacgctggcctgaaagctgaagaagcaggcattggagacacccccagcctggaagacgaagctgctggtcacgtgacccaagctcgcatggtcagtaaaagcaaagacgggactggaagcgatgacaaaaaagccaagggggctgatggtaaaacgaagatcgccacaccgcggggagcagcccctccaggccagaagggccaggccaacgccaccaggattccagcaaaaaccccgcccgctccaaagacaccacccagctctggtgaacctccaaaatcaggggatcgcagcggctacagcagccccggctccccaggcactcccggcagccgctcccgcaccccgtcccttccaaccccacccacccgggagcccaagaaggtggcagtggtccgtactccacccaagtcgccgtcttccgccaagagccgcctgcagacagcccccgtgcccatgccagacctgaagaatgtcaagtccaagatcggctccactgagaacctgaagcaccagccgggaggcgggaaggtgcagataattaataagaagctggatcttagcaacgtccagtccaagtgtggctcaaaggataatatcaaacacgtcccgggaggcggcagtgtgcaaatagtctacaaaccagttgacctgagcaaggtgacctccaagtgtggctcattaggcaacatccatcataaaccaggaggtggccaggtggaagtaaaatctgagaagcttgacttcaaggacagagtccagtcgaagattgggtccctggacaatatcacccacgtccctggcggaggaaataaaaagattgaaacccacaagctgaccttccgcgagaacgccaaagccaagacagaccacggggcggagatcgtgtacaagtcgccagtggtgtctggggacacgtctccacggcatctcagcaatgtctcctccaccggcagcatcgacatggtagactcgccccagctcgccacgctagctgacgaggtgtctgcctccctggccaagcagggtttgtgatcaggcccctggggcggtcaataattgtggagaggagagaatgagagagtgtggaaaaaaaaagaataatgacccggcccccgccctctgcccccagctgctcctcgcagttcggttaattggttaatcacttaacctgcttttgtcactcggctttggctcgggacttcaaaatcagtgatgggagtaagagcaaatttcatctttccaaattgatgggtgggctagtaataaaatatttaaaaaaaaacattcaaaaacatggccacatccaacatttcctcaggcaattccttttgattcttttttcttccccctccatgtagaagagggagaaggagaggctctgaaagctgcttctgggggatttcaagggactgggggtgccaaccacctctggccctgttgtgggggtgtcacagaggcagtggcagcaacaaaggatttgaaacttggtgtgttcgtggagccacaggcagacgatgtcaaccttgtgtgagtgtgacgggggttggggtggggcgggaggccacgggggaggccgaggcaggggctgggcagaggggagaggaagcacaagaagtgggagtgggagaggaagccacgtgctggagagtagacatccccctccttgccgctgggagagccaaggcctatgccacctgcagcgtctgagcggccgcctgtccttggtggccgggggtgggggcctgctgtgggtcagtgtgccaccctctgcagggcagcctgtgggagaagggacagcgggtaaaaagagaaggcaagctggcaggagggtggcacttcgtggatgacctccttagaaaagactgaccttgatgtcttgagagcgctggcctcttcctccctccctgcagggtagggggcctgagttgaggggcttccctctgctccacagaaaccctgttttattgagttctgaaggttggaactgctgccatgattttggccactttgcagacctgggactttagggctaaccagttctctttgtaaggacttgtgcctcttgggagacgtccacccgtttccaagcctgggccactggcatctctggagtgtgtgggggtctgggaggcaggtcccgagccccctgtccttcccacggccactgcagtcaccccgtctgcgccgctgtgctgttgtctgccgtgagagcccaatcactgcctatacccctcatcacacgtcacaatgtcccgaattcccagcctcaccaccccttctcagtaatgaccctggttggttgcaggaggtacctactccatactgagggtgaaattaagggaaggcaaagtccaggcacaagagtgggaccccagcctctcactctcagttccactcatccaactgggaccctcaccacgaatctcatgatctgattcggttccctgtctcctcctcccgtcacagatgtgagccagggcactgctcagctgtgaccctaggtgtttctgccttgttgacatggagagagccctttcccctgagaaggcctggccccttcctgtgctgagcccacagcagcaggctgggtgtcttggttgtcagtggtggcaccaggatggaagggcaaggcacccagggcaggcccacagtcccgctgtcccccacttgcaccctagcttgtagctgccaacctcccagacagcccagcccgctgctcagctccacatgcatagtatcagccctccacacccgacaaaggggaacacacccccttggaaatggttcttttcccccagtcccagctggaagccatgctgtctgttctgctggagcagctgaacatatacatagatgttgccctgccctccccatctgcaccctgttgagttgtagttggatttgtctgtttatgcttggattcaccagagtgactatgatagtgaaaagaaaaaaaaaaaaaaaaaaggacgcatgtatcttgaaatgcttgtaaagaggtttctaacccaccctcacgaggtgtctctcacccccacactgggactcgtgtggcctgtgtggtgccaccctgctggggcctcccaagttttgaaaggctttcctcagcacctgggacccaacagagaccagcttctagcagctaaggaggccgttcagctgtgacgaaggcctgaagcacaggattaggactgaagcgatgatgtccccttccctacttccccttggggctccctgtgtcagggcacagactaggtcttgtggctggtctggcttgcggcgcgaggatggttctctctggtcatagcccgaagtctcatggcagtcccaaaggaggcttacaactcctgcatcacaagaaaaaggaagccactgccagctggggggatctgcagctcccagaagctccgtgagcctcagccacccctcagactgggttcctctccaagctcgccctctggaggggcagcgcagcctcccaccaagggccctgcgaccacagcagggattgggatgaattgcctgtcctggatctgctctagaggcccaagctgcctgcctgaggaaggatgacttgacaagtcaggagacactgttcccaaagccttgaccagagcacctcagcccgctgaccttgcacaaactccatctgctgccatgagaaaagggaagccgcctttgcaaaacattgctgcctaaagaaactcagcagcctcaggcccaattctgccacttctggtttgggtacagttaaaggcaaccctgagggacttggcagtagaaatccagggcctcccctggggctggcagcttcgtgtgcagctagagctttacctgaaaggaagtctctgggcccagaactctccaccaagagcctccctgccgttcgctgagtcccagcaattctcctaagttgaagggatctgagaaggagaaggaaatgtggggtagatttggtggtggttagagatatgcccccctcattactgccaacagtttcggctgcatttcttcacgcacctcggttcctcttcctgaagttcttgtgccctgctcttcagcaccatgggccttcttatacggaaggctctgggatctcccccttgtggggcaggctcttggggccagcctaagatcatggtttagggtgatcagtgctggcagataaattgaaaaggcacgctggcttgtgatcttaaatgaggacaatccccccagggctgggcactcctcccctcccctcacttctcccacctgcagagccagtgtccttgggtgggctagataggatatactgtatgccggctccttcaagctgctgactcactttatcaatagttccatttaaattgacttcagtggtgagactgtatcctgtttgctattgcttgttgtgctatggggggaggggggaggaatgtgtaagatagttaacatgggcaaagggagatcttggggtgcagcacttaaactgcctcgtaacccttttcatgatttcaaccacatttgctagagggagggagcagccacggagttagaggcccttggggtttctcttttccactgacaggctttcccaggcagctggctagttcattccctccccagccaggtgcaggcgtaggaatatggacatctggttgctttggcctgctgccctctttcaggggtcctaagcccacaatcatgcctccctaagaccttggcatccttccctctaagccgttggcacctctgtgccacctctcacactggctccagacacacagcctgtgcttttggagctgagatcactcgcttcaccctcctcatctttgttctccaagtaaagccacgaggtcggggcgagggcagaggtgatcacctgcgtgtcccatctacagacctgcagcttcataaaacttctgatttctcttcagctttgaaaagggttaccctgggcactggcctagagcctcacctcctaatagacttagccccatgagtttgccatgttgagcaggactatttctggcacttgcaagtcccatgatttcttcggtaattctgagggtggggggagggacatgaaatcatcttagcttagctttctgtctgtgaatgtctatatagtgtattgtgtgttttaacaaatgatttacactgactgttgctgtaaaagtgaatttggaaataaagttattactctgattaaa

SEQ ID NO: 402 - DNA, 5372 bp, Artificial Sequence
  Description of Artificial Sequence: Synthetic polynucleotide
gcagtcaccgccacccaccagctccggcaccaacagcagcgccgctgccaccgcccaccttctgccgccgccaccacagccaccttctcctcctccgctgtcctctcccgtcctcgcctctgtcgactatcaggtgaactttgaaccaggatggctgagccccgccaggagttcgaagtgatggaagatcacgctgggacgtacgggttgggggacaggaaagatcaggggggctacaccatgcaccaagaccaagagggtgacacggacgctggcctgaaagctgaagaagcaggcattggagacacccccagcctggaagacgaagctgctggtcacgtgacccaagctcgcatggtcagtaaaagcaaagacgggactggaagcgatgacaaaaaagccaagggggctgatggtaaaacgaagatcgccacaccgcggggagcagcccctccaggccagaagggccaggccaacgccaccaggattccagcaaaaaccccgcccgctccaaagacaccacccagctctggtgaacctccaaaatcaggggatcgcagcggctacagcagccccggctccccaggcactcccggcagccgctcccgcaccccgtcccttccaaccccacccacccgggagcccaagaaggtggcagtggtccgtactccacccaagtcgccgtcttccgccaagagccgcctgcagacagcccccgtgcccatgccagacctgaagaatgtcaagtccaagatcggctccactgagaacctgaagcaccagccgggaggcgggaaggtgcaaatagtctacaaaccagttgacctgagcaaggtgacctccaagtgtggctcattaggcaacatccatcataaaccaggaggtggccaggtggaagtaaaatctgagaagcttgacttcaaggacagagtccagtcgaagattgggtccctggacaatatcacccacgtccctggcggaggaaataaaaagattgaaacccacaagctgaccttccgcgagaacgccaaagccaagacagaccacggggcggagatcgtgtacaagtcgccagtggtgtctggggacacgtctccacggcatctcagcaatgtctcctccaccggcagcatcgacatggtagactcgccccagctcgccacgctagctgacgaggtgtctgcctccctggccaagcagggtttgtgatcaggcccctggggcggtcaataattgtggagaggagagaatgagagagtgtggaaaaaaaaagaataatgacccggcccccgccctctgcccccagctgctcctcgcagttcggttaattggttaatcacttaacctgcttttgtcactcggctttggctcgggacttcaaaatcagtgatgggagtaagagcaaatttcatctttccaaattgatgggtgggctagtaataaaatatttaaaaaaaaacattcaaaaacatggccacatccaacatttcctcaggcaattccttttgattcttttttcttccccctccatgtagaagagggagaaggagaggctctgaaagctgcttctgggggatttcaagggactgggggtgccaaccacctctggccctgttgtgggggtgtcacagaggcagtggcagcaacaaaggatttgaaacttggtgtgttcgtggagccacaggcagacgatgtcaaccttgtgtgagtgtgacgggggttggggtggggcgggaggccacgggggaggccgaggcaggggctgggcagaggggagaggaagcacaagaagtgggagtgggagaggaagccacgtgctggagagtagacatccccctccttgccgctgggagagccaaggcctatgccacctgcagcgtctgagcggccgcctgtccttggtggccgggggtgggggcctgctgtgggtcagtgtgccaccctctgcagggcagcctgtgggagaagggacagcgggtaaaaagagaaggcaagctggcaggagggtggcacttcgtggatgacctccttagaaaagactgaccttgatgtcttgagagcgctggcctcttcctccctccctgcagggtagggggcctgagttgaggggcttccctctgctccacagaaaccctgttttattgagttctgaaggttggaactgctgccatgattttggccactttgcagacctgggactttagggctaaccagttctctttgtaaggacttgtgcctcttgggagacgtccacccgtttccaagcctgggccactggcatctctggagtgtgtgggggtctgggaggcaggtcccgagccccctgtccttcccacggccactgcagtcaccccgtctgcgccgctgtgctgttgtctgccgtgagagcccaatcactgcctatacccctcatcacacgtcacaatgtcccgaattcccagcctcaccaccccttctcagtaatgaccctggttggttgcaggaggtacctactccatactgagggtgaaattaagggaaggcaaagtccaggcacaagagtgggaccccagcctctcactctcagttccactcatccaactgggaccctcaccacgaatctcatgatctgattcggttccctgtctcctcctcccgtcacagatgtgagccagggcactgctcagctgtgaccctaggtgtttctgccttgttgacatggagagagccctttcccctgagaaggcctggccccttcctgtgctgagcccacagcagcaggctgggtgtcttggttgtcagtggtggcaccaggatggaagggcaaggcacccagggcaggcccacagtcccgctgtcccccacttgcaccctagcttgtagctgccaacctcccagacagcccagcccgctgctcagctccacatgcatagtatcagccctccacacccgacaaaggggaacacacccccttggaaatggttcttttcccccagtcccagctggaagccatgctgtctgttctgctggagcagctgaacatatacatagatgttgccctgccctccccatctgcaccctgttgagttgtagttggatttgtctgtttatgcttggattcaccagagtgactatgatagtgaaaagaaaaaaaaaaaaaaaaaaggacgcatgtatcttgaaatgcttgtaaagaggtttctaacccaccctcacgaggtgtctctcacccccacactgggactcgtgtggcctgtgtggtgccaccctgctggggcctcccaagttttgaaaggctttcctcagcacctgggacccaacagagaccagcttctagcagctaaggaggccgttcagctgtgacgaaggcctgaagcacaggattaggactgaagcgatgatgtccccttccctacttccccttggggctccctgtgtcagggcacagactaggtcttgtggctggtctggcttgcggcgcgaggatggttctctctggtcatagcccgaagtctcatggcagtcccaaaggaggcttacaactcctgcatcacaagaaaaaggaagccactgccagctggggggatctgcagctcccagaagctccgtgagcctcagccacccctcagactgggttcctctccaagctcgccctctggaggggcagcgcagcctcccaccaagggccctgcgaccacagcagggattgggatgaattgcctgtcctggatctgctctagaggcccaagctgcctgcctgaggaaggatgacttgacaagtcaggagacactgttcccaaagccttgaccagagcacctcagcccgctgaccttgcacaaactccatctgctgccatgagaaaagggaagccgcctttgcaaaacattgctgcctaaagaaactcagcagcctcaggcccaattctgccacttctggtttgggtacagttaaaggcaaccctgagggacttggcagtagaaatccagggcctcccctggggctggcagcttcgtgtgcagctagagctttacctgaaaggaagtctctgggcccagaactctccaccaagagcctccctgccgttcgctgagtcccagcaattctcctaagttgaagggatctgagaaggagaaggaaatgtggggtagatttggtggtggttagagatatgcccccctcattactgccaacagtttcggctgcatttcttcacgcacctcggttcctcttcctgaagttcttgtgccctgctcttcagcaccatgggccttcttatacggaaggctctgggatctcccccttgtggggcaggctcttggggccagcctaagatcatggtttagggtgatcagtgctggcagataaattgaaaaggcacgctggcttgtgatcttaaatgaggacaatccccccagggctgggcactcctcccctcccctcacttctcccacctgcagagccagtgtccttgggtgggctagataggatatactgtatgccggctccttcaagctgctgactcactttatcaatagttccatttaaattgacttcagtggtgagactgtatcctgtttgctattgcttgttgtgctatggggggaggggggaggaatgtgtaagatagttaacatgggcaaagggagatcttggggtgcagcacttaaactgcctcgtaacccttttcatgatttcaaccacatttgctagagggagggagcagccacggagttagaggcccttggggtttctcttttccactgacaggctttcccaggcagctggctagttcattccctccccagccaggtgcaggcgtaggaatatggacatctggttgctttggcctgctgccctctttcaggggtcctaagcccacaatcatgcctccctaagaccttggcatccttccctctaagccgttggcacctctgtgccacctctcacactggctccagacacacagcctgtgcttttggagctgagatcactcgcttcaccctcctcatctttgttctccaagtaaagccacgaggtcggggcgagggcagaggtgatcacctgcgtgtcccatctacagacctgcagcttcataaaacttctgatttctcttcagctttgaaaagggttaccctgggcactggcctagagcctcacctcctaatagacttagccccatgagtttgccatgttgagcaggactatttctggcacttgcaagtcccatgatttcttcggtaattctgagggtggggggagggacatgaaatcatcttagcttagctttctgtctgtgaatgtctatatagtgtattgtgtgttttaacaaatgatttacactgactgttgctgtaaaagtgaatttggaaataaagttattactctgattaaa

SEQ ID NO: 403 - DNA, 5552 bp, Artificial Sequence
  Description of Artificial Sequence: Synthetic polynucleotide
gcagtcaccgccacccaccagctccggcaccaacagcagcgccgctgccaccgcccaccttctgccgccgccaccacagccaccttctcctcctccgctgtcctctcccgtcctcgcctctgtcgactatcaggtgaactttgaaccaggatggctgagccccgccaggagttcgaagtgatggaagatcacgctgggacgtacgggttgggggacaggaaagatcaggggggctacaccatgcaccaagaccaagagggtgacacggacgctggcctgaaagaatctcccctgcagacccccactgaggacggatctgaggaaccgggctctgaaacctctgatgctaagagcactccaacagcggaagctgaagaagcaggcattggagacacccccagcctggaagacgaagctgctggtcacgtgacccaagctcgcatggtcagtaaaagcaaagacgggactggaagcgatgacaaaaaagccaagggggctgatggtaaaacgaagatcgccacaccgcggggagcagcccctccaggccagaagggccaggccaacgccaccaggattccagcaaaaaccccgcccgctccaaagacaccacccagctctggtgaacctccaaaatcaggggatcgcagcggctacagcagccccggctccccaggcactcccggcagccgctcccgcaccccgtcccttccaaccccacccacccgggagcccaagaaggtggcagtggtccgtactccacccaagtcgccgtcttccgccaagagccgcctgcagacagcccccgtgcccatgccagacctgaagaatgtcaagtccaagatcggctccactgagaacctgaagcaccagccgggaggcgggaaggtgcagataattaataagaagctggatcttagcaacgtccagtccaagtgtggctcaaaggataatatcaaacacgtcccgggaggcggcagtgtgcaaatagtctacaaaccagttgacctgagcaaggtgacctccaagtgtggctcattaggcaacatccatcataaaccaggaggtggccaggtggaagtaaaatctgagaagcttgacttcaaggacagagtccagtcgaagattgggtccctggacaatatcacccacgtccctggcggaggaaataaaaagattgaaacccacaagctgaccttccgcgagaacgccaaagccaagacagaccacggggcggagatcgtgtacaagtcgccagtggtgtctggggacacgtctccacggcatctcagcaatgtctcctccaccggcagcatcgacatggtagactcgccccagctcgccacgctagctgacgaggtgtctgcctccctggccaagcagggtttgtgatcaggcccctggggcggtcaataattgtggagaggagagaatgagagagtgtggaaaaaaaaagaataatgacccggcccccgccctctgcccccagctgctcctcgcagttcggttaattggttaatcacttaacctgcttttgtcactcggctttggctcgggacttcaaaatcagtgatgggagtaagagcaaatttcatctttccaaattgatgggtgggctagtaataaaatatttaaaaaaaaacattcaaaaacatggccacatccaacatttcctcaggcaattccttttgattcttttttcttccccctccatgtagaagagggagaaggagaggctctgaaagctgcttctgggggatttcaagggactgggggtgccaaccacctctggccctgttgtgggggtgtcacagaggcagtggcagcaacaaaggatttgaaacttggtgtgttcgtggagccacaggcagacgatgtcaaccttgtgtgagtgtgacgggggttggggtggggcgggaggccacgggggaggccgaggcaggggctgggcagaggggagaggaagcacaagaagtgggagtgggagaggaagccacgtgctggagagtagacatccccctccttgccgctgggagagccaaggcctatgccacctgcagcgtctgagcggccgcctgtccttggtggccgggggtgggggcctgctgtgggtcagtgtgccaccctctgcagggcagcctgtgggagaagggacagcgggtaaaaagagaaggcaagctggcaggagggtggcacttcgtggatgacctccttagaaaagactgaccttgatgtcttgagagcgctggcctcttcctccctccctgcagggtagggggcctgagttgaggggcttccctctgctccacagaaaccctgttttattgagttctgaaggttggaactgctgccatgattttggccactttgcagacctgggactttagggctaaccagttctctttgtaaggacttgtgcctcttgggagacgtccacccgtttccaagcctgggccactggcatctctggagtgtgtgggggtctgggaggcaggtcccgagccccctgtccttcccacggccactgcagtcaccccgtctgcgccgctgtgctgttgtctgccgtgagagcccaatcactgcctatacccctcatcacacgtcacaatgtcccgaattcccagcctcaccaccccttctcagtaatgaccctggttggttgcaggaggtacctactccatactgagggtgaaattaagggaaggcaaagtccaggcacaagagtgggaccccagcctctcactctcagttccactcatccaactgggaccctcaccacgaatctcatgatctgattcggttccctgtctcctcctcccgtcacagatgtgagccagggcactgctcagctgtgaccctaggtgtttctgccttgttgacatggagagagccctttcccctgagaaggcctggccccttcctgtgctgagcccacagcagcaggctgggtgtcttggttgtcagtggtggcaccaggatggaagggcaaggcacccagggcaggcccacagtcccgctgtcccccacttgcaccctagcttgtagctgccaacctcccagacagcccagcccgctgctcagctccacatgcatagtatcagccctccacacccgacaaaggggaacacacccccttggaaatggttcttttcccccagtcccagctggaagccatgctgtctgttctgctggagcagctgaacatatacatagatgttgccctgccctccccatctgcaccctgttgagttgtagttggatttgtctgtttatgcttggattcaccagagtgactatgatagtgaaaagaaaaaaaaaaaaaaaaaaggacgcatgtatcttgaaatgcttgtaaagaggtttctaacccaccctcacgaggtgtctctcacccccacactgggactcgtgtggcctgtgtggtgccaccctgctggggcctcccaagttttgaaaggctttcctcagcacctgggacccaacagagaccagcttctagcagctaaggaggccgttcagctgtgacgaaggcctgaagcacaggattaggactgaagcgatgatgtccccttccctacttccccttggggctccctgtgtcagggcacagactaggtcttgtggctggtctggcttgcggcgcgaggatggttctctctggtcatagcccgaagtctcatggcagtcccaaaggaggcttacaactcctgcatcacaagaaaaaggaagccactgccagctggggggatctgcagctcccagaagctccgtgagcctcagccacccctcagactgggttcctctccaagctcgccctctggaggggcagcgcagcctcccaccaagggccctgcgaccacagcagggattgggatgaattgcctgtcctggatctgctctagaggcccaagctgcctgcctgaggaaggatgacttgacaagtcaggagacactgttcccaaagccttgaccagagcacctcagcccgctgaccttgcacaaactccatctgctgccatgagaaaagggaagccgcctttgcaaaacattgctgcctaaagaaactcagcagcctcaggcccaattctgccacttctggtttgggtacagttaaaggcaaccctgagggacttggcagtagaaatccagggcctcccctggggctggcagcttcgtgtgcagctagagctttacctgaaaggaagtctctgggcccagaactctccaccaagagcctccctgccgttcgctgagtcccagcaattctcctaagttgaagggatctgagaaggagaaggaaatgtggggtagatttggtggtggttagagatatgcccccctcattactgccaacagtttcggctgcatttcttcacgcacctcggttcctcttcctgaagttcttgtgccctgctcttcagcaccatgggccttcttatacggaaggctctgggatctcccccttgtggggcaggctcttggggccagcctaagatcatggtttagggtgatcagtgctggcagataaattgaaaaggcacgctggcttgtgatcttaaatgaggacaatccccccagggctgggcactcctcccctcccctcacttctcccacctgcagagccagtgtccttgggtgggctagataggatatactgtatgccggctccttcaagctgctgactcactttatcaatagttccatttaaattgacttcagtggtgagactgtatcctgtttgctattgcttgttgtgctatggggggaggggggaggaatgtgtaagatagttaacatgggcaaagggagatcttggggtgcagcacttaaactgcctcgtaacccttttcatgatttcaaccacatttgctagagggagggagcagccacggagttagaggcccttggggtttctcttttccactgacaggctttcccaggcagctggctagttcattccctccccagccaggtgcaggcgtaggaatatggacatctggttgctttggcctgctgccctctttcaggggtcctaagcccacaatcatgcctccctaagaccttggcatccttccctctaagccgttggcacctctgtgccacctctcacactggctccagacacacagcctgtgcttttggagctgagatcactcgcttcaccctcctcatctttgttctccaagtaaagccacgaggtcggggcgagggcagaggtgatcacctgcgtgtcccatctacagacctgcagcttcataaaacttctgatttctcttcagctttgaaaagggttaccctgggcactggcctagagcctcacctcctaatagacttagccccatgagtttgccatgttgagcaggactatttctggcacttgcaagtcccatgatttcttcggtaattctgagggtggggggagggacatgaaatcatcttagcttagctttctgtctgtgaatgtctatatagtgtattgtgtgttttaacaaatgatttacactgactgttgctgtaaaagtgaatttggaaataaagttattactctgattaaa

SEQ ID NO: 404 - DNA, 6644 bp, Artificial Sequence
  Description of Artificial Sequence: Synthetic polynucleotide
gcagtcaccgccacccaccagctccggcaccaacagcagcgccgctgccaccgcccaccttctgccgccgccaccacagccaccttctcctcctccgctgtcctctcccgtcctcgcctctgtcgactatcaggtgaactttgaaccaggatggctgagccccgccaggagttcgaagtgatggaagatcacgctgggacgtacgggttgggggacaggaaagatcaggggggctacaccatgcaccaagaccaagagggtgacacggacgctggcctgaaagaatctcccctgcagacccccactgaggacggatctgaggaaccgggctctgaaacctctgatgctaagagcactccaacagcggaagatgtgacagcacccttagtggatgagggagctcccggcaagcaggctgccgcgcagccccacacggagatcccagaaggaaccacagctgaagaagcaggcattggagacacccccagcctggaagacgaagctgctggtcacgtgacccaagagcctgaaagtggtaaggtggtccaggaaggcttcctccgagagccaggccccccaggtctgagccaccagctcatgtccggcatgcctggggctcccctcctgcctgagggccccagagaggccacacgccaaccttcggggacaggacctgaggacacagagggcggccgccacgcccctgagctgctcaagcaccagcttctaggagacctgcaccaggaggggccgccgctgaagggggcagggggcaaagagaggccggggagcaaggaggaggtggatgaagaccgcgacgtcgatgagtcctccccccaagactcccctccctccaaggcctccccagcccaagatgggcggcctccccagacagccgccagagaagccaccagcatcccaggcttcccagcggagggtgccatccccctccctgtggatttcctctccaaagtttccacagagatcccagcctcagagcccgacgggcccagtgtagggcgggccaaagggcaggatgcccccctggagttcacgtttcacgtggaaatcacacccaacgtgcagaaggagcaggcgcactcggaggagcatttgggaagggctgcatttccaggggcccctggagaggggccagaggcccggggcccctctttgggagaggacacaaaagaggctgaccttccagagccctctgaaaagcagcctgctgctgctccgcgggggaagcccgtcagccgggtccctcaactcaaagctcgcatggtcagtaaaagcaaagacgggactggaagcgatgacaaaaaagccaagacatccacacgttcctctgctaaaaccttgaaaaataggccttgccttagccccaaacaccccactcctggtagctcagaccctctgatccaaccctccagccctgctgtgtgcccagagccaccttcctctcctaaatacgtctcttctgtcacttcccgaactggcagttctggagcaaaggagatgaaactcaagggggctgatggtaaaacgaagatcgccacaccgcggggagcagcccctccaggccagaagggccaggccaacgccaccaggattccagcaaaaaccccgcccgctccaaagacaccacccagctctgcgactaagcaagtccagagaagaccaccccctgcagggcccagatctgagagaggtgaacctccaaaatcaggggatcgcagcggctacagcagccccggctccccaggcactcccggcagccgctcccgcaccccgtcccttccaaccccacccacccgggagcccaagaaggtggcagtggtccgtactccacccaagtcgccgtcttccgccaagagccgcctgcagacagcccccgtgcccatgccagacctgaagaatgtcaagtccaagatcggctccactgagaacctgaagcaccagccgggaggcgggaaggtgcagataattaataagaagctggatcttagcaacgtccagtccaagtgtggctcaaaggataatatcaaacacgtcccgggaggcggcagtgtgcaaatagtctacaaaccagttgacctgagcaaggtgacctccaagtgtggctcattaggcaacatccatcataaaccaggaggtggccaggtggaagtaaaatctgagaagcttgacttcaaggacagagtccagtcgaagattgggtccctggacaatatcacccacgtccctggcggaggaaataaaaagattgaaacccacaagctgaccttccgcgagaacgccaaagccaagacagaccacggggcggagatcgtgtacaagtcgccagtggtgtctggggacacgtctccacggcatctcagcaatgtctcctccaccggcagcatcgacatggtagactcgccccagctcgccacgctagctgacgaggtgtctgcctccctggccaagcagggtttgtgatcaggcccctggggcggtcaataattgtggagaggagagaatgagagagtgtggaaaaaaaaagaataatgacccggcccccgccctctgcccccagctgctcctcgcagttcggttaattggttaatcacttaacctgcttttgtcactcggctttggctcgggacttcaaaatcagtgatgggagtaagagcaaatttcatctttccaaattgatgggtgggctagtaataaaatatttaaaaaaaaacattcaaaaacatggccacatccaacatttcctcaggcaattccttttgattcttttttcttccccctccatgtagaagagggagaaggagaggctctgaaagctgcttctgggggatttcaagggactgggggtgccaaccacctctggccctgttgtgggggtgtcacagaggcagtggcagcaacaaaggatttgaaacttggtgtgttcgtggagccacaggcagacgatgtcaaccttgtgtgagtgtgacgggggttggggtggggcgggaggccacgggggaggccgaggcaggggctgggcagaggggagaggaagcacaagaagtgggagtgggagaggaagccacgtgctggagagtagacatccccctccttgccgctgggagagccaaggcctatgccacctgcagcgtctgagcggccgcctgtccttggtggccgggggtgggggcctgctgtgggtcagtgtgccaccctctgcagggcagcctgtgggagaagggacagcgggtaaaaagagaaggcaagctggcaggagggtggcacttcgtggatgacctccttagaaaagactgaccttgatgtcttgagagcgctggcctcttcctccctccctgcagggtagggggcctgagttgaggggcttccctctgctccacagaaaccctgttttattgagttctgaaggttggaactgctgccatgattttggccactttgcagacctgggactttagggctaaccagttctctttgtaaggacttgtgcctcttgggagacgtccacccgtttccaagcctgggccactggcatctctggagtgtgtgggggtctgggaggcaggtcccgagccccctgtccttcccacggccactgcagtcaccccgtctgcgccgctgtgctgttgtctgccgtgagagcccaatcactgcctatacccctcatcacacgtcacaatgtcccgaattcccagcctcaccaccccttctcagtaatgaccctggttggttgcaggaggtacctactccatactgagggtgaaattaagggaaggcaaagtccaggcacaagagtgggaccccagcctctcactctcagttccactcatccaactgggaccctcaccacgaatctcatgatctgattcggttccctgtctcctcctcccgtcacagatgtgagccagggcactgctcagctgtgaccctaggtgtttctgccttgttgacatggagagagccctttcccctgagaaggcctggccccttcctgtgctgagcccacagcagcaggctgggtgtcttggttgtcagtggtggcaccaggatggaagggcaaggcacccagggcaggcccacagtcccgctgtcccccacttgcaccctagcttgtagctgccaacctcccagacagcccagcccgctgctcagctccacatgcatagtatcagccctccacacccgacaaaggggaacacacccccttggaaatggttcttttcccccagtcccagctggaagccatgctgtctgttctgctggagcagctgaacatatacatagatgttgccctgccctccccatctgcaccctgttgagttgtagttggatttgtctgtttatgcttggattcaccagagtgactatgatagtgaaaagaaaaaaaaaaaaaaaaaaggacgcatgtatcttgaaatgcttgtaaagaggtttctaacccaccctcacgaggtgtctctcacccccacactgggactcgtgtggcctgtgtggtgccaccctgctggggcctcccaagttttgaaaggctttcctcagcacctgggacccaacagagaccagcttctagcagctaaggaggccgttcagctgtgacgaaggcctgaagcacaggattaggactgaagcgatgatgtccccttccctacttccccttggggctccctgtgtcagggcacagactaggtcttgtggctggtctggcttgcggcgcgaggatggttctctctggtcatagcccgaagtctcatggcagtcccaaaggaggcttacaactcctgcatcacaagaaaaaggaagccactgccagctggggggatctgcagctcccagaagctccgtgagcctcagccacccctcagactgggttcctctccaagctcgccctctggaggggcagcgcagcctcccaccaagggccctgcgaccacagcagggattgggatgaattgcctgtcctggatctgctctagaggcccaagctgcctgcctgaggaaggatgacttgacaagtcaggagacactgttcccaaagccttgaccagagcacctcagcccgctgaccttgcacaaactccatctgctgccatgagaaaagggaagccgcctttgcaaaacattgctgcctaaagaaactcagcagcctcaggcccaattctgccacttctggtttgggtacagttaaaggcaaccctgagggacttggcagtagaaatccagggcctcccctggggctggcagcttcgtgtgcagctagagctttacctgaaaggaagtctctgggcccagaactctccaccaagagcctccctgccgttcgctgagtcccagcaattctcctaagttgaagggatctgagaaggagaaggaaatgtggggtagatttggtggtggttagagatatgcccccctcattactgccaacagtttcggctgcatttcttcacgcacctcggttcctcttcctgaagttcttgtgccctgctcttcagcaccatgggccttcttatacggaaggctctgggatctcccccttgtggggcaggctcttggggccagcctaagatcatggtttagggtgatcagtgctggcagataaattgaaaaggcacgctggcttgtgatcttaaatgaggacaatccccccagggctgggcactcctcccctcccctcacttctcccacctgcagagccagtgtccttgggtgggctagataggatatactgtatgccggctccttcaagctgctgactcactttatcaatagttccatttaaattgacttcagtggtgagactgtatcctgtttgctattgcttgttgtgctatggggggaggggggaggaatgtgtaagatagttaacatgggcaaagggagatcttggggtgcagcacttaaactgcctcgtaacccttttcatgatttcaaccacatttgctagagggagggagcagccacggagttagaggcccttggggtttctcttttccactgacaggctttcccaggcagctggctagttcattccctccccagccaggtgcaggcgtaggaatatggacatctggttgctttggcctgctgccctctttcaggggtcctaagcccacaatcatgcctccctaagaccttggcatccttccctctaagccgttggcacctctgtgccacctctcacactggctccagacacacagcctgtgcttttggagctgagatcactcgcttcaccctcctcatctttgttctccaagtaaagccacgaggtcggggcgagggcagaggtgatcacctgcgtgtcccatctacagacctgcagcttcataaaacttctgatttctcttcagctttgaaaagggttaccctgggcactggcctagagcctcacctcctaatagacttagccccatgagtttgccatgttgagcaggactatttctggcacttgcaagtcccatgatttcttcggtaattctgagggtggggggagggacatgaaatcatcttagcttagctttctgtctgtgaatgtctatatagtgtattgtgtgttttaacaaatgatttacactgactgttgctgtaaaagtgaatttggaaataaagttattactctgattaaa

SEQ ID NO: 405 - DNA, 5459 bp, Artificial Sequence
  Description of Artificial Sequence: Synthetic polynucleotide
gcagtcaccgccacccaccagctccggcaccaacagcagcgccgctgccaccgcccaccttctgccgccgccaccacagccaccttctcctcctccgctgtcctctcccgtcctcgcctctgtcgactatcaggtgaactttgaaccaggatggctgagccccgccaggagttcgaagtgatggaagatcacgctgggacgtacgggttgggggacaggaaagatcaggggggctacaccatgcaccaagaccaagagggtgacacggacgctggcctgaaagaatctcccctgcagacccccactgaggacggatctgaggaaccgggctctgaaacctctgatgctaagagcactccaacagcggaagctgaagaagcaggcattggagacacccccagcctggaagacgaagctgctggtcacgtgacccaagctcgcatggtcagtaaaagcaaagacgggactggaagcgatgacaaaaaagccaagggggctgatggtaaaacgaagatcgccacaccgcggggagcagcccctccaggccagaagggccaggccaacgccaccaggattccagcaaaaaccccgcccgctccaaagacaccacccagctctggtgaacctccaaaatcaggggatcgcagcggctacagcagccccggctccccaggcactcccggcagccgctcccgcaccccgtcccttccaaccccacccacccgggagcccaagaaggtggcagtggtccgtactccacccaagtcgccgtcttccgccaagagccgcctgcagacagcccccgtgcccatgccagacctgaagaatgtcaagtccaagatcggctccactgagaacctgaagcaccagccgggaggcgggaaggtgcaaatagtctacaaaccagttgacctgagcaaggtgacctccaagtgtggctcattaggcaacatccatcataaaccaggaggtggccaggtggaagtaaaatctgagaagcttgacttcaaggacagagtccagtcgaagattgggtccctggacaatatcacccacgtccctggcggaggaaataaaaagattgaaacccacaagctgaccttccgcgagaacgccaaagccaagacagaccacggggcggagatcgtgtacaagtcgccagtggtgtctggggacacgtctccacggcatctcagcaatgtctcctccaccggcagcatcgacatggtagactcgccccagctcgccacgctagctgacgaggtgtctgcctccctggccaagcagggtttgtgatcaggcccctggggcggtcaataattgtggagaggagagaatgagagagtgtggaaaaaaaaagaataatgacccggcccccgccctctgcccccagctgctcctcgcagttcggttaattggttaatcacttaacctgcttttgtcactcggctttggctcgggacttcaaaatcagtgatgggagtaagagcaaatttcatctttccaaattgatgggtgggctagtaataaaatatttaaaaaaaaacattcaaaaacatggccacatccaacatttcctcaggcaattccttttgattcttttttcttccccctccatgtagaagagggagaaggagaggctctgaaagctgcttctgggggatttcaagggactgggggtgccaaccacctctggccctgttgtgggggtgtcacagaggcagtggcagcaacaaaggatttgaaacttggtgtgttcgtggagccacaggcagacgatgtcaaccttgtgtgagtgtgacgggggttggggtggggcgggaggccacgggggaggccgaggcaggggctgggcagaggggagaggaagcacaagaagtgggagtgggagaggaagccacgtgctggagagtagacatccccctccttgccgctgggagagccaaggcctatgccacctgcagcgtctgagcggccgcctgtccttggtggccgggggtgggggcctgctgtgggtcagtgtgccaccctctgcagggcagcctgtgggagaagggacagcgggtaaaaagagaaggcaagctggcaggagggtggcacttcgtggatgacctccttagaaaagactgaccttgatgtcttgagagcgctggcctcttcctccctccctgcagggtagggggcctgagttgaggggcttccctctgctccacagaaaccctgttttattgagttctgaaggttggaactgctgccatgattttggccactttgcagacctgggactttagggctaaccagttctctttgtaaggacttgtgcctcttgggagacgtccacccgtttccaagcctgggccactggcatctctggagtgtgtgggggtctgggaggcaggtcccgagccccctgtccttcccacggccactgcagtcaccccgtctgcgccgctgtgctgttgtctgccgtgagagcccaatcactgcctatacccctcatcacacgtcacaatgtcccgaattcccagcctcaccaccccttctcagtaatgaccctggttggttgcaggaggtacctactccatactgagggtgaaattaagggaaggcaaagtccaggcacaagagtgggaccccagcctctcactctcagttccactcatccaactgggaccctcaccacgaatctcatgatctgattcggttccctgtctcctcctcccgtcacagatgtgagccagggcactgctcagctgtgaccctaggtgtttctgccttgttgacatggagagagccctttcccctgagaaggcctggccccttcctgtgctgagcccacagcagcaggctgggtgtcttggttgtcagtggtggcaccaggatggaagggcaaggcacccagggcaggcccacagtcccgctgtcccccacttgcaccctagcttgtagctgccaacctcccagacagcccagcccgctgctcagctccacatgcatagtatcagccctccacacccgacaaaggggaacacacccccttggaaatggttcttttcccccagtcccagctggaagccatgctgtctgttctgctggagcagctgaacatatacatagatgttgccctgccctccccatctgcaccctgttgagttgtagttggatttgtctgtttatgcttggattcaccagagtgactatgatagtgaaaagaaaaaaaaaaaaaaaaaaggacgcatgtatcttgaaatgcttgtaaagaggtttctaacccaccctcacgaggtgtctctcacccccacactgggactcgtgtggcctgtgtggtgccaccctgctggggcctcccaagttttgaaaggctttcctcagcacctgggacccaacagagaccagcttctagcagctaaggaggccgttcagctgtgacgaaggcctgaagcacaggattaggactgaagcgatgatgtccccttccctacttccccttggggctccctgtgtcagggcacagactaggtcttgtggctggtctggcttgcggcgcgaggatggttctctctggtcatagcccgaagtctcatggcagtcccaaaggaggcttacaactcctgcatcacaagaaaaaggaagccactgccagctggggggatctgcagctcccagaagctccgtgagcctcagccacccctcagactgggttcctctccaagctcgccctctggaggggcagcgcagcctcccaccaagggccctgcgaccacagcagggattgggatgaattgcctgtcctggatctgctctagaggcccaagctgcctgcctgaggaaggatgacttgacaagtcaggagacactgttcccaaagccttgaccagagcacctcagcccgctgaccttgcacaaactccatctgctgccatgagaaaagggaagccgcctttgcaaaacattgctgcctaaagaaactcagcagcctcaggcccaattctgccacttctggtttgggtacagttaaaggcaaccctgagggacttggcagtagaaatccagggcctcccctggggctggcagcttcgtgtgcagctagagctttacctgaaaggaagtctctgggcccagaactctccaccaagagcctccctgccgttcgctgagtcccagcaattctcctaagttgaagggatctgagaaggagaaggaaatgtggggtagatttggtggtggttagagatatgcccccctcattactgccaacagtttcggctgcatttcttcacgcacctcggttcctcttcctgaagttcttgtgccctgctcttcagcaccatgggccttcttatacggaaggctctgggatctcccccttgtggggcaggctcttggggccagcctaagatcatggtttagggtgatcagtgctggcagataaattgaaaaggcacgctggcttgtgatcttaaatgaggacaatccccccagggctgggcactcctcccctcccctcacttctcccacctgcagagccagtgtccttgggtgggctagataggatatactgtatgccggctccttcaagctgctgactcactttatcaatagttccatttaaattgacttcagtggtgagactgtatcctgtttgctattgcttgttgtgctatggggggaggggggaggaatgtgtaagatagttaacatgggcaaagggagatcttggggtgcagcacttaaactgcctcgtaacccttttcatgatttcaaccacatttgctagagggagggagcagccacggagttagaggcccttggggtttctcttttccactgacaggctttcccaggcagctggctagttcattccctccccagccaggtgcaggcgtaggaatatggacatctggttgctttggcctgctgccctctttcaggggtcctaagcccacaatcatgcctccctaagaccttggcatccttccctctaagccgttggcacctctgtgccacctctcacactggctccagacacacagcctgtgcttttggagctgagatcactcgcttcaccctcctcatctttgttctccaagtaaagccacgaggtcggggcgagggcagaggtgatcacctgcgtgtcccatctacagacctgcagcttcataaaacttctgatttctcttcagctttgaaaagggttaccctgggcactggcctagagcctcacctcctaatagacttagccccatgagtttgccatgttgagcaggactatttctggcacttgcaagtcccatgatttcttcggtaattctgagggtggggggagggacatgaaatcatcttagcttagctttctgtctgtgaatgtctatatagtgtattgtgtgttttaacaaatgatttacactgactgttgctgtaaaagtgaatttggaaataaagttattactctgattaaa

SEQ ID NO: 406 - DNA, 5546 bp, Artificial Sequence
  Description of Artificial Sequence: Synthetic polynucleotide
gcagtcaccgccacccaccagctccggcaccaacagcagcgccgctgccaccgcccaccttctgccgccgccaccacagccaccttctcctcctccgctgtcctctcccgtcctcgcctctgtcgactatcaggtgaactttgaaccaggatggctgagccccgccaggagttcgaagtgatggaagatcacgctgggacgtacgggttgggggacaggaaagatcaggggggctacaccatgcaccaagaccaagagggtgacacggacgctggcctgaaagaatctcccctgcagacccccactgaggacggatctgaggaaccgggctctgaaacctctgatgctaagagcactccaacagcggaagatgtgacagcacccttagtggatgagggagctcccggcaagcaggctgccgcgcagccccacacggagatcccagaaggaaccacagctgaagaagcaggcattggagacacccccagcctggaagacgaagctgctggtcacgtgacccaagctcgcatggtcagtaaaagcaaagacgggactggaagcgatgacaaaaaagccaagggggctgatggtaaaacgaagatcgccacaccgcggggagcagcccctccaggccagaagggccaggccaacgccaccaggattccagcaaaaaccccgcccgctccaaagacaccacccagctctggtgaacctccaaaatcaggggatcgcagcggctacagcagccccggctccccaggcactcccggcagccgctcccgcaccccgtcccttccaaccccacccacccgggagcccaagaaggtggcagtggtccgtactccacccaagtcgccgtcttccgccaagagccgcctgcagacagcccccgtgcccatgccagacctgaagaatgtcaagtccaagatcggctccactgagaacctgaagcaccagccgggaggcgggaaggtgcaaatagtctacaaaccagttgacctgagcaaggtgacctccaagtgtggctcattaggcaacatccatcataaaccaggaggtggccaggtggaagtaaaatctgagaagcttgacttcaaggacagagtccagtcgaagattgggtccctggacaatatcacccacgtccctggcggaggaaataaaaagattgaaacccacaagctgaccttccgcgagaacgccaaagccaagacagaccacggggcggagatcgtgtacaagtcgccagtggtgtctggggacacgtctccacggcatctcagcaatgtctcctccaccggcagcatcgacatggtagactcgccccagctcgccacgctagctgacgaggtgtctgcctccctggccaagcagggtttgtgatcaggcccctggggcggtcaataattgtggagaggagagaatgagagagtgtggaaaaaaaaagaataatgacccggcccccgccctctgcccccagctgctcctcgcagttcggttaattggttaatcacttaacctgcttttgtcactcggctttggctcgggacttcaaaatcagtgatgggagtaagagcaaatttcatctttccaaattgatgggtgggctagtaataaaatatttaaaaaaaaacattcaaaaacatggccacatccaacatttcctcaggcaattccttttgattcttttttcttccccctccatgtagaagagggagaaggagaggctctgaaagctgcttctgggggatttcaagggactgggggtgccaaccacctctggccctgttgtgggggtgtcacagaggcagtggcagcaacaaaggatttgaaacttggtgtgttcgtggagccacaggcagacgatgtcaaccttgtgtgagtgtgacgggggttggggtggggcgggaggccacgggggaggccgaggcaggggctgggcagaggggagaggaagcacaagaagtgggagtgggagaggaagccacgtgctggagagtagacatccccctccttgccgctgggagagccaaggcctatgccacctgcagcgtctgagcggccgcctgtccttggtggccgggggtgggggcctgctgtgggtcagtgtgccaccctctgcagggcagcctgtgggagaagggacagcgggtaaaaagagaaggcaagctggcaggagggtggcacttcgtggatgacctccttagaaaagactgaccttgatgtcttgagagcgctggcctcttcctccctccctgcagggtagggggcctgagttgaggggcttccctctgctccacagaaaccctgttttattgagttctgaaggttggaactgctgccatgattttggccactttgcagacctgggactttagggctaaccagttctctttgtaaggacttgtgcctcttgggagacgtccacccgtttccaagcctgggccactggcatctctggagtgtgtgggggtctgggaggcaggtcccgagccccctgtccttcccacggccactgcagtcaccccgtctgcgccgctgtgctgttgtctgccgtgagagcccaatcactgcctatacccctcatcacacgtcacaatgtcccgaattcccagcctcaccaccccttctcagtaatgaccctggttggttgcaggaggtacctactccatactgagggtgaaattaagggaaggcaaagtccaggcacaagagtgggaccccagcctctcactctcagttccactcatccaactgggaccctcaccacgaatctcatgatctgattcggttccctgtctcctcctcccgtcacagatgtgagccagggcactgctcagctgtgaccctaggtgtttctgccttgttgacatggagagagccctttcccctgagaaggcctggccccttcctgtgctgagcccacagcagcaggctgggtgtcttggttgtcagtggtggcaccaggatggaagggcaaggcacccagggcaggcccacagtcccgctgtcccccacttgcaccctagcttgtagctgccaacctcccagacagcccagcccgctgctcagctccacatgcatagtatcagccctccacacccgacaaaggggaacacacccccttggaaatggttcttttcccccagtcccagctggaagccatgctgtctgttctgctggagcagctgaacatatacatagatgttgccctgccctccccatctgcaccctgttgagttgtagttggatttgtctgtttatgcttggattcaccagagtgactatgatagtgaaaagaaaaaaaaaaaaaaaaaaggacgcatgtatcttgaaatgcttgtaaagaggtttctaacccaccctcacgaggtgtctctcacccccacactgggactcgtgtggcctgtgtggtgccaccctgctggggcctcccaagttttgaaaggctttcctcagcacctgggacccaacagagaccagcttctagcagctaaggaggccgttcagctgtgacgaaggcctgaagcacaggattaggactgaagcgatgatgtccccttccctacttccccttggggctccctgtgtcagggcacagactaggtcttgtggctggtctggcttgcggcgcgaggatggttctctctggtcatagcccgaagtctcatggcagtcccaaaggaggcttacaactcctgcatcacaagaaaaaggaagccactgccagctggggggatctgcagctcccagaagctccgtgagcctcagccacccctcagactgggttcctctccaagctcgccctctggaggggcagcgcagcctcccaccaagggccctgcgaccacagcagggattgggatgaattgcctgtcctggatctgctctagaggcccaagctgcctgcctgaggaaggatgacttgacaagtcaggagacactgttcccaaagccttgaccagagcacctcagcccgctgaccttgcacaaactccatctgctgccatgagaaaagggaagccgcctttgcaaaacattgctgcctaaagaaactcagcagcctcaggcccaattctgccacttctggtttgggtacagttaaaggcaaccctgagggacttggcagtagaaatccagggcctcccctggggctggcagcttcgtgtgcagctagagctttacctgaaaggaagtctctgggcccagaactctccaccaagagcctccctgccgttcgctgagtcccagcaattctcctaagttgaagggatctgagaaggagaaggaaatgtggggtagatttggtggtggttagagatatgcccccctcattactgccaacagtttcggctgcatttcttcacgcacctcggttcctcttcctgaagttcttgtgccctgctcttcagcaccatgggccttcttatacggaaggctctgggatctcccccttgtggggcaggctcttggggccagcctaagatcatggtttagggtgatcagtgctggcagataaattgaaaaggcacgctggcttgtgatcttaaatgaggacaatccccccagggctgggcactcctcccctcccctcacttctcccacctgcagagccagtgtccttgggtgggctagataggatatactgtatgccggctccttcaagctgctgactcactttatcaatagttccatttaaattgacttcagtggtgagactgtatcctgtttgctattgcttgttgtgctatggggggaggggggaggaatgtgtaagatagttaacatgggcaaagggagatcttggggtgcagcacttaaactgcctcgtaacccttttcatgatttcaaccacatttgctagagggagggagcagccacggagttagaggcccttggggtttctcttttccactgacaggctttcccaggcagctggctagttcattccctccccagccaggtgcaggcgtaggaatatggacatctggttgctttggcctgctgccctctttcaggggtcctaagcccacaatcatgcctccctaagaccttggcatccttccctctaagccgttggcacctctgtgccacctctcacactggctccagacacacagcctgtgcttttggagctgagatcactcgcttcaccctcctcatctttgttctccaagtaaagccacgaggtcggggcgagggcagaggtgatcacctgcgtgtcccatctacagacctgcagcttcataaaacttctgatttctcttcagctttgaaaagggttaccctgggcactggcctagagcctcacctcctaatagacttagccccatgagtttgccatgttgagcaggactatttctggcacttgcaagtcccatgatttcttcggtaattctgagggtggggggagggacatgaaatcatcttagcttagctttctgtctgtgaatgtctatatagtgtattgtgtgttttaacaaatgatttacactgactgttgctgtaaaagtgaatttggaaataaagttattactctgattaaa

SEQ ID NO: 407 - DNA, 6815 bp, Artificial Sequence
  Description of Artificial Sequence: Synthetic polynucleotide
gcagtcaccgccacccaccagctccggcaccaacagcagcgccgctgccaccgcccaccttctgccgccgccaccacagccaccttctcctcctccgctgtcctctcccgtcctcgcctctgtcgactatcaggtgaactttgaaccaggatggctgagccccgccaggagttcgaagtgatggaagatcacgctgggacgtacgggttgggggacaggaaagatcaggggggctacaccatgcaccaagaccaagagggtgacacggacgctggcctgaaagaatctcccctgcagacccccactgaggacggatctgaggaaccgggctctgaaacctctgatgctaagagcactccaacagcggaagctgaagaagcaggcattggagacacccccagcctggaagacgaagctgctggtcacgtgacccaagaggagttgagagttccgggccggcagaggaaggcgcctgaaaggcccctggccaatgagattagcgcccacgtccagcctggaccctgcggagaggcctctggggtctctgggccgtgcctcggggagaaagagccagaagctcccgtcccgctgaccgcgagccttcctcagcaccgtcccgtttgcccagcgcctcctccaacaggaggccctcaggagccctccctggagtggggacaaaaaggcggggactgggccgagaagggtccggcctttccgaagcccgccaccactgcgtatctccacacagagcctgaaagtggtaaggtggtccaggaaggcttcctccgagagccaggccccccaggtctgagccaccagctcatgtccggcatgcctggggctcccctcctgcctgagggccccagagaggccacacgccaaccttcggggacaggacctgaggacacagagggcggccgccacgcccctgagctgctcaagcaccagcttctaggagacctgcaccaggaggggccgccgctgaagggggcagggggcaaagagaggccggggagcaaggaggaggtggatgaagaccgcgacgtcgatgagtcctccccccaagactcccctccctccaaggcctccccagcccaagatgggcggcctccccagacagccgccagagaagccaccagcatcccaggcttcccagcggagggtgccatccccctccctgtggatttcctctccaaagtttccacagagatcccagcctcagagcccgacgggcccagtgtagggcgggccaaagggcaggatgcccccctggagttcacgtttcacgtggaaatcacacccaacgtgcagaaggagcaggcgcactcggaggagcatttgggaagggctgcatttccaggggcccctggagaggggccagaggcccggggcccctctttgggagaggacacaaaagaggctgaccttccagagccctctgaaaagcagcctgctgctgctccgcgggggaagcccgtcagccgggtccctcaactcaaagctcgcatggtcagtaaaagcaaagacgggactggaagcgatgacaaaaaagccaagacatccacacgttcctctgctaaaaccttgaaaaataggccttgccttagccccaaacaccccactcctggtagctcagaccctctgatccaaccctccagccctgctgtgtgcccagagccaccttcctctcctaaatacgtctcttctgtcacttcccgaactggcagttctggagcaaaggagatgaaactcaagggggctgatggtaaaacgaagatcgccacaccgcggggagcagcccctccaggccagaagggccaggccaacgccaccaggattccagcaaaaaccccgcccgctccaaagacaccacccagctctggtgaacctccaaaatcaggggatcgcagcggctacagcagccccggctccccaggcactcccggcagccgctcccgcaccccgtcccttccaaccccacccacccgggagcccaagaaggtggcagtggtccgtactccacccaagtcgccgtcttccgccaagagccgcctgcagacagcccccgtgcccatgccagacctgaagaatgtcaagtccaagatcggctccactgagaacctgaagcaccagccgggaggcgggaaggtgcagataattaataagaagctggatcttagcaacgtccagtccaagtgtggctcaaaggataatatcaaacacgtcccgggaggcggcagtgtgcaaatagtctacaaaccagttgacctgagcaaggtgacctccaagtgtggctcattaggcaacatccatcataaaccaggaggtggccaggtggaagtaaaatctgagaagcttgacttcaaggacagagtccagtcgaagattgggtccctggacaatatcacccacgtccctggcggaggaaataaaaagattgaaacccacaagctgaccttccgcgagaacgccaaagccaagacagaccacggggcggagatcgtgtacaagtcgccagtggtgtctggggacacgtctccacggcatctcagcaatgtctcctccaccggcagcatcgacatggtagactcgccccagctcgccacgctagctgacgaggtgtctgcctccctggccaagcagggtttgtgatcaggcccctggggcggtcaataattgtggagaggagagaatgagagagtgtggaaaaaaaaagaataatgacccggcccccgccctctgcccccagctgctcctcgcagttcggttaattggttaatcacttaacctgcttttgtcactcggctttggctcgggacttcaaaatcagtgatgggagtaagagcaaatttcatctttccaaattgatgggtgggctagtaataaaatatttaaaaaaaaacattcaaaaacatggccacatccaacatttcctcaggcaattccttttgattcttttttcttccccctccatgtagaagagggagaaggagaggctctgaaagctgcttctgggggatttcaagggactgggggtgccaaccacctctggccctgttgtgggggtgtcacagaggcagtggcagcaacaaaggatttgaaacttggtgtgttcgtggagccacaggcagacgatgtcaaccttgtgtgagtgtgacgggggttggggtggggcgggaggccacgggggaggccgaggcaggggctgggcagaggggagaggaagcacaagaagtgggagtgggagaggaagccacgtgctggagagtagacatccccctccttgccgctgggagagccaaggcctatgccacctgcagcgtctgagcggccgcctgtccttggtggccgggggtgggggcctgctgtgggtcagtgtgccaccctctgcagggcagcctgtgggagaagggacagcgggtaaaaagagaaggcaagctggcaggagggtggcacttcgtggatgacctccttagaaaagactgaccttgatgtcttgagagcgctggcctcttcctccctccctgcagggtagggggcctgagttgaggggcttccctctgctccacagaaaccctgttttattgagttctgaaggttggaactgctgccatgattttggccactttgcagacctgggactttagggctaaccagttctctttgtaaggacttgtgcctcttgggagacgtccacccgtttccaagcctgggccactggcatctctggagtgtgtgggggtctgggaggcaggtcccgagccccctgtccttcccacggccactgcagtcaccccgtctgcgccgctgtgctgttgtctgccgtgagagcccaatcactgcctatacccctcatcacacgtcacaatgtcccgaattcccagcctcaccaccccttctcagtaatgaccctggttggttgcaggaggtacctactccatactgagggtgaaattaagggaaggcaaagtccaggcacaagagtgggaccccagcctctcactctcagttccactcatccaactgggaccctcaccacgaatctcatgatctgattcggttccctgtctcctcctcccgtcacagatgtgagccagggcactgctcagctgtgaccctaggtgtttctgccttgttgacatggagagagccctttcccctgagaaggcctggccccttcctgtgctgagcccacagcagcaggctgggtgtcttggttgtcagtggtggcaccaggatggaagggcaaggcacccagggcaggcccacagtcccgctgtcccccacttgcaccctagcttgtagctgccaacctcccagacagcccagcccgctgctcagctccacatgcatagtatcagccctccacacccgacaaaggggaacacacccccttggaaatggttcttttcccccagtcccagctggaagccatgctgtctgttctgctggagcagctgaacatatacatagatgttgccctgccctccccatctgcaccctgttgagttgtagttggatttgtctgtttatgcttggattcaccagagtgactatgatagtgaaaagaaaaaaaaaaaaaaaaaaggacgcatgtatcttgaaatgcttgtaaagaggtttctaacccaccctcacgaggtgtctctcacccccacactgggactcgtgtggcctgtgtggtgccaccctgctggggcctcccaagttttgaaaggctttcctcagcacctgggacccaacagagaccagcttctagcagctaaggaggccgttcagctgtgacgaaggcctgaagcacaggattaggactgaagcgatgatgtccccttccctacttccccttggggctccctgtgtcagggcacagactaggtcttgtggctggtctggcttgcggcgcgaggatggttctctctggtcatagcccgaagtctcatggcagtcccaaaggaggcttacaactcctgcatcacaagaaaaaggaagccactgccagctggggggatctgcagctcccagaagctccgtgagcctcagccacccctcagactgggttcctctccaagctcgccctctggaggggcagcgcagcctcccaccaagggccctgcgaccacagcagggattgggatgaattgcctgtcctggatctgctctagaggcccaagctgcctgcctgaggaaggatgacttgacaagtcaggagacactgttcccaaagccttgaccagagcacctcagcccgctgaccttgcacaaactccatctgctgccatgagaaaagggaagccgcctttgcaaaacattgctgcctaaagaaactcagcagcctcaggcccaattctgccacttctggtttgggtacagttaaaggcaaccctgagggacttggcagtagaaatccagggcctcccctggggctggcagcttcgtgtgcagctagagctttacctgaaaggaagtctctgggcccagaactctccaccaagagcctccctgccgttcgctgagtcccagcaattctcctaagttgaagggatctgagaaggagaaggaaatgtggggtagatttggtggtggttagagatatgcccccctcattactgccaacagtttcggctgcatttcttcacgcacctcggttcctcttcctgaagttcttgtgccctgctcttcagcaccatgggccttcttatacggaaggctctgggatctcccccttgtggggcaggctcttggggccagcctaagatcatggtttagggtgatcagtgctggcagataaattgaaaaggcacgctggcttgtgatcttaaatgaggacaatccccccagggctgggcactcctcccctcccctcacttctcccacctgcagagccagtgtccttgggtgggctagataggatatactgtatgccggctccttcaagctgctgactcactttatcaatagttccatttaaattgacttcagtggtgagactgtatcctgtttgctattgcttgttgtgctatggggggaggggggaggaatgtgtaagatagttaacatgggcaaagggagatcttggggtgcagcacttaaactgcctcgtaacccttttcatgatttcaaccacatttgctagagggagggagcagccacggagttagaggcccttggggtttctcttttccactgacaggctttcccaggcagctggctagttcattccctccccagccaggtgcaggcgtaggaatatggacatctggttgctttggcctgctgccctctttcaggggtcctaagcccacaatcatgcctccctaagaccttggcatccttccctctaagccgttggcacctctgtgccacctctcacactggctccagacacacagcctgtgcttttggagctgagatcactcgcttcaccctcctcatctttgttctccaagtaaagccacgaggtcggggcgagggcagaggtgatcacctgcgtgtcccatctacagacctgcagcttcataaaacttctgatttctcttcagctttgaaaagggttaccctgggcactggcctagagcctcacctcctaatagacttagccccatgagtttgccatgttgagcaggactatttctggcacttgcaagtcccatgatttcttcggtaattctgagggtggggggagggacatgaaatcatcttagcttagctttctgtctgtgaatgtctatatagtgtattgtgtgttttaacaaatgatttacactgactgttgctgtaaaagtgaatttggaaataaagttattactctgattaaa

SEQ ID NO: 408 - DNA, 6524 bp, Artificial Sequence
  Description of Artificial Sequence: Synthetic polynucleotide
gcagtcaccgccacccaccagctccggcaccaacagcagcgccgctgccaccgcccaccttctgccgccgccaccacagccaccttctcctcctccgctgtcctctcccgtcctcgcctctgtcgactatcaggtgaactttgaaccaggatggctgagccccgccaggagttcgaagtgatggaagatcacgctgggacgtacgggttgggggacaggaaagatcaggggggctacaccatgcaccaagaccaagagggtgacacggacgctggcctgaaagaatctcccctgcagacccccactgaggacggatctgaggaaccgggctctgaaacctctgatgctaagagcactccaacagcggaagctgaagaagcaggcattggagacacccccagcctggaagacgaagctgctggtcacgtgacccaagaggagttgagagttccgggccggcagaggaaggcgcctgaaaggcccctggccaatgagattagcgcccacgtccagcctggaccctgcggagaggcctctggggtctctgggccgtgcctcggggagaaagagccagaagctcccgtcccgctgaccgcgagccttcctcagcaccgtcccgtttgcccagcgcctcctccaacaggaggccctcaggagccctccctggagtggggacaaaaaggcggggactgggccgagaagggtccggcctttccgaagcccgccaccactgcgtatctccacacagagcctgaaagtggtaaggtggtccaggaaggcttcctccgagagccaggccccccaggtctgagccaccagctcatgtccggcatgcctggggctcccctcctgcctgagggccccagagaggccacacgccaaccttcggggacaggacctgaggacacagagggcggccgccacgcccctgagctgctcaagcaccagcttctaggagacctgcaccaggaggggccgccgctgaagggggcagggggcaaagagaggccggggagcaaggaggaggtggatgaagaccgcgacgtcgatgagtcctccccccaagactcccctccctccaaggcctccccagcccaagatgggcggcctccccagacagccgccagagaagccaccagcatcccaggcttcccagcggagggtgccatccccctccctgtggatttcctctccaaagtttccacagagatcccagcctcagagcccgacgggcccagtgtagggcgggccaaagggcaggatgcccccctggagttcacgtttcacgtggaaatcacacccaacgtgcagaaggagcaggcgcactcggaggagcatttgggaagggctgcatttccaggggcccctggagaggggccagaggcccggggcccctctttgggagaggacacaaaagaggctgaccttccagagccctctgaaaagcagcctgctgctgctccgcgggggaagcccgtcagccgggtccctcaactcaaagctcgcatggtcagtaaaagcaaagacgggactggaagcgatgacaaaaaagccaagggggctgatggtaaaacgaagatcgccacaccgcggggagcagcccctccaggccagaagggccaggccaacgccaccaggattccagcaaaaaccccgcccgctccaaagacaccacccagctctggtgaacctccaaaatcaggggatcgcagcggctacagcagccccggctccccaggcactcccggcagccgctcccgcaccccgtcccttccaaccccacccacccgggagcccaagaaggtggcagtggtccgtactccacccaagtcgccgtcttccgccaagagccgcctgcagacagcccccgtgcccatgccagacctgaagaatgtcaagtccaagatcggctccactgagaacctgaagcaccagccgggaggcgggaaggtgcaaatagtctacaaaccagttgacctgagcaaggtgacctccaagtgtggctcattaggcaacatccatcataaaccaggaggtggccaggtggaagtaaaatctgagaagcttgacttcaaggacagagtccagtcgaagattgggtccctggacaatatcacccacgtccctggcggaggaaataaaaagattgaaacccacaagctgaccttccgcgagaacgccaaagccaagacagaccacggggcggagatcgtgtacaagtcgccagtggtgtctggggacacgtctccacggcatctcagcaatgtctcctccaccggcagcatcgacatggtagactcgccccagctcgccacgctagctgacgaggtgtctgcctccctggccaagcagggtttgtgatcaggcccctggggcggtcaataattgtggagaggagagaatgagagagtgtggaaaaaaaaagaataatgacccggcccccgccctctgcccccagctgctcctcgcagttcggttaattggttaatcacttaacctgcttttgtcactcggctttggctcgggacttcaaaatcagtgatgggagtaagagcaaatttcatctttccaaattgatgggtgggctagtaataaaatatttaaaaaaaaacattcaaaaacatggccacatccaacatttcctcaggcaattccttttgattcttttttcttccccctccatgtagaagagggagaaggagaggctctgaaagctgcttctgggggatttcaagggactgggggtgccaaccacctctggccctgttgtgggggtgtcacagaggcagtggcagcaacaaaggatttgaaacttggtgtgttcgtggagccacaggcagacgatgtcaaccttgtgtgagtgtgacgggggttggggtggggcgggaggccacgggggaggccgaggcaggggctgggcagaggggagaggaagcacaagaagtgggagtgggagaggaagccacgtgctggagagtagacatccccctccttgccgctgggagagccaaggcctatgccacctgcagcgtctgagcggccgcctgtccttggtggccgggggtgggggcctgctgtgggtcagtgtgccaccctctgcagggcagcctgtgggagaagggacagcgggtaaaaagagaaggcaagctggcaggagggtggcacttcgtggatgacctccttagaaaagactgaccttgatgtcttgagagcgctggcctcttcctccctccctgcagggtagggggcctgagttgaggggcttccctctgctccacagaaaccctgttttattgagttctgaaggttggaactgctgccatgattttggccactttgcagacctgggactttagggctaaccagttctctttgtaaggacttgtgcctcttgggagacgtccacccgtttccaagcctgggccactggcatctctggagtgtgtgggggtctgggaggcaggtcccgagccccctgtccttcccacggccactgcagtcaccccgtctgcgccgctgtgctgttgtctgccgtgagagcccaatcactgcctatacccctcatcacacgtcacaatgtcccgaattcccagcctcaccaccccttctcagtaatgaccctggttggttgcaggaggtacctactccatactgagggtgaaattaagggaaggcaaagtccaggcacaagagtgggaccccagcctctcactctcagttccactcatccaactgggaccctcaccacgaatctcatgatctgattcggttccctgtctcctcctcccgtcacagatgtgagccagggcactgctcagctgtgaccctaggtgtttctgccttgttgacatggagagagccctttcccctgagaaggcctggccccttcctgtgctgagcccacagcagcaggctgggtgtcttggttgtcagtggtggcaccaggatggaagggcaaggcacccagggcaggcccacagtcccgctgtcccccacttgcaccctagcttgtagctgccaacctcccagacagcccagcccgctgctcagctccacatgcatagtatcagccctccacacccgacaaaggggaacacacccccttggaaatggttcttttcccccagtcccagctggaagccatgctgtctgttctgctggagcagctgaacatatacatagatgttgccctgccctccccatctgcaccctgttgagttgtagttggatttgtctgtttatgcttggattcaccagagtgactatgatagtgaaaagaaaaaaaaaaaaaaaaaaggacgcatgtatcttgaaatgcttgtaaagaggtttctaacccaccctcacgaggtgtctctcacccccacactgggactcgtgtggcctgtgtggtgccaccctgctggggcctcccaagttttgaaaggctttcctcagcacctgggacccaacagagaccagcttctagcagctaaggaggccgttcagctgtgacgaaggcctgaagcacaggattaggactgaagcgatgatgtccccttccctacttccccttggggctccctgtgtcagggcacagactaggtcttgtggctggtctggcttgcggcgcgaggatggttctctctggtcatagcccgaagtctcatggcagtcccaaaggaggcttacaactcctgcatcacaagaaaaaggaagccactgccagctggggggatctgcagctcccagaagctccgtgagcctcagccacccctcagactgggttcctctccaagctcgccctctggaggggcagcgcagcctcccaccaagggccctgcgaccacagcagggattgggatgaattgcctgtcctggatctgctctagaggcccaagctgcctgcctgaggaaggatgacttgacaagtcaggagacactgttcccaaagccttgaccagagcacctcagcccgctgaccttgcacaaactccatctgctgccatgagaaaagggaagccgcctttgcaaaacattgctgcctaaagaaactcagcagcctcaggcccaattctgccacttctggtttgggtacagttaaaggcaaccctgagggacttggcagtagaaatccagggcctcccctggggctggcagcttcgtgtgcagctagagctttacctgaaaggaagtctctgggcccagaactctccaccaagagcctccctgccgttcgctgagtcccagcaattctcctaagttgaagggatctgagaaggagaaggaaatgtggggtagatttggtggtggttagagatatgcccccctcattactgccaacagtttcggctgcatttcttcacgcacctcggttcctcttcctgaagttcttgtgccctgctcttcagcaccatgggccttcttatacggaaggctctgggatctcccccttgtggggcaggctcttggggccagcctaagatcatggtttagggtgatcagtgctggcagataaattgaaaaggcacgctggcttgtgatcttaaatgaggacaatccccccagggctgggcactcctcccctcccctcacttctcccacctgcagagccagtgtccttgggtgggctagataggatatactgtatgccggctccttcaagctgctgactcactttatcaatagttccatttaaattgacttcagtggtgagactgtatcctgtttgctattgcttgttgtgctatggggggaggggggaggaatgtgtaagatagttaacatgggcaaagggagatcttggggtgcagcacttaaactgcctcgtaacccttttcatgatttcaaccacatttgctagagggagggagcagccacggagttagaggcccttggggtttctcttttccactgacaggctttcccaggcagctggctagttcattccctccccagccaggtgcaggcgtaggaatatggacatctggttgctttggcctgctgccctctttcaggggtcctaagcccacaatcatgcctccctaagaccttggcatccttccctctaagccgttggcacctctgtgccacctctcacactggctccagacacacagcctgtgcttttggagctgagatcactcgcttcaccctcctcatctttgttctccaagtaaagccacgaggtcggggcgagggcagaggtgatcacctgcgtgtcccatctacagacctgcagcttcataaaacttctgatttctcttcagctttgaaaagggttaccctgggcactggcctagagcctcacctcctaatagacttagccccatgagtttgccatgttgagcaggactatttctggcacttgcaagtcccatgatttcttcggtaattctgagggtggggggagggacatgaaatcatcttagcttagctttctgtctgtgaatgtctatatagtgtattgtgtgttttaacaaatgatttacactgactgttgctgtaaaagtgaatttggaaataaagttattactctgattaaa

SEQ ID NO: 409 - DNA, 4139 bp, Artificial Sequence
  Description of Artificial Sequence: Synthetic polynucleotide
gcagtcaccgccacccaccagctccggcaccaacagcagcgccgctgccaccgcccaccttctgccgccgccaccacagccaccttctcctcctccgctgtcctctcccgtcctcgcctctgtcgactatcaggtgaactttgaaccaggatggctgagccccgccaggagttcgaagtgatggaagatcacgctgggacgtacgggttgggggacaggaaagatcaggggggctacaccatgcaccaagaccaagagggtgacacggacgctggcctgaaagaatctcccctgcagacccccactgaggacggatctgaggaaccgggctctgaaacctctgatgctaagagcactccaacagcggaagctgaagaagcaggcattggagacacccccagcctggaagacgaagctgctggtcacgtgacccaagctcgcatggtcagtaaaagcaaagacgggactggaagcgatgacaaaaaagccaagggggctgatggtaaaacgaagatcgccacaccgcggggagcagcccctccaggccagaagggccaggccaacgccaccaggattccagcaaaaaccccgcccgctccaaagacaccacccagctctggtgaacctccaaaatcaggggatcgcagcggctacagcagccccggctccccaggcactcccggcagccgctcccgcaccccgtcccttccaaccccacccacccgggagcccaagaaggtggcagtggtccgtactccacccaagtcgccgtcttccgccaagagccgcctgcagacagcccccgtgcccatgccagacctgaagaatgtcaagtccaagatcggctccactgagaacctgaagcaccagccgggaggcgggaaggtgcaaatagtctacaaaccagttgacctgagcaaggttggaactgctgccatgattttggccactttgcagacctgggactttagggctaaccagttctctttgtaaggacttgtgcctcttgggagacgtccacccgtttccaagcctgggccactggcatctctggagtgtgtgggggtctgggaggcaggtcccgagccccctgtccttcccacggccactgcagtcaccccgtctgcgccgctgtgctgttgtctgccgtgagagcccaatcactgcctatacccctcatcacacgtcacaatgtcccgaattcccagcctcaccaccccttctcagtaatgaccctggttggttgcaggaggtacctactccatactgagggtgaaattaagggaaggcaaagtccaggcacaagagtgggaccccagcctctcactctcagttccactcatccaactgggaccctcaccacgaatctcatgatctgattcggttccctgtctcctcctcccgtcacagatgtgagccagggcactgctcagctgtgaccctaggtgtttctgccttgttgacatggagagagccctttcccctgagaaggcctggccccttcctgtgctgagcccacagcagcaggctgggtgtcttggttgtcagtggtggcaccaggatggaagggcaaggcacccagggcaggcccacagtcccgctgtcccccacttgcaccctagcttgtagctgccaacctcccagacagcccagcccgctgctcagctccacatgcatagtatcagccctccacacccgacaaaggggaacacacccccttggaaatggttcttttcccccagtcccagctggaagccatgctgtctgttctgctggagcagctgaacatatacatagatgttgccctgccctccccatctgcaccctgttgagttgtagttggatttgtctgtttatgcttggattcaccagagtgactatgatagtgaaaagaaaaaaaaaaaaaaaaaaggacgcatgtatcttgaaatgcttgtaaagaggtttctaacccaccctcacgaggtgtctctcacccccacactgggactcgtgtggcctgtgtggtgccaccctgctggggcctcccaagttttgaaaggctttcctcagcacctgggacccaacagagaccagcttctagcagctaaggaggccgttcagctgtgacgaaggcctgaagcacaggattaggactgaagcgatgatgtccccttccctacttccccttggggctccctgtgtcagggcacagactaggtcttgtggctggtctggcttgcggcgcgaggatggttctctctggtcatagcccgaagtctcatggcagtcccaaaggaggcttacaactcctgcatcacaagaaaaaggaagccactgccagctggggggatctgcagctcccagaagctccgtgagcctcagccacccctcagactgggttcctctccaagctcgccctctggaggggcagcgcagcctcccaccaagggccctgcgaccacagcagggattgggatgaattgcctgtcctggatctgctctagaggcccaagctgcctgcctgaggaaggatgacttgacaagtcaggagacactgttcccaaagccttgaccagagcacctcagcccgctgaccttgcacaaactccatctgctgccatgagaaaagggaagccgcctttgcaaaacattgctgcctaaagaaactcagcagcctcaggcccaattctgccacttctggtttgggtacagttaaaggcaaccctgagggacttggcagtagaaatccagggcctcccctggggctggcagcttcgtgtgcagctagagctttacctgaaaggaagtctctgggcccagaactctccaccaagagcctccctgccgttcgctgagtcccagcaattctcctaagttgaagggatctgagaaggagaaggaaatgtggggtagatttggtggtggttagagatatgcccccctcattactgccaacagtttcggctgcatttcttcacgcacctcggttcctcttcctgaagttcttgtgccctgctcttcagcaccatgggccttcttatacggaaggctctgggatctcccccttgtggggcaggctcttggggccagcctaagatcatggtttagggtgatcagtgctggcagataaattgaaaaggcacgctggcttgtgatcttaaatgaggacaatccccccagggctgggcactcctcccctcccctcacttctcccacctgcagagccagtgtccttgggtgggctagataggatatactgtatgccggctccttcaagctgctgactcactttatcaatagttccatttaaattgacttcagtggtgagactgtatcctgtttgctattgcttgttgtgctatggggggaggggggaggaatgtgtaagatagttaacatgggcaaagggagatcttggggtgcagcacttaaactgcctcgtaacccttttcatgatttcaaccacatttgctagagggagggagcagccacggagttagaggcccttggggtttctcttttccactgacaggctttcccaggcagctggctagttcattccctccccagccaggtgcaggcgtaggaatatggacatctggttgctttggcctgctgccctctttcaggggtcctaagcccacaatcatgcctccctaagaccttggcatccttccctctaagccgttggcacctctgtgccacctctcacactggctccagacacacagcctgtgcttttggagctgagatcactcgcttcaccctcctcatctttgttctccaagtaaagccacgaggtcggggcgagggcagaggtgatcacctgcgtgtcccatctacagacctgcagcttcataaaacttctgatttctcttcagctttgaaaagggttaccctgggcactggcctagagcctcacctcctaatagacttagccccatgagtttgccatgttgagcaggactatttctggcacttgcaagtcccatgatttcttcggtaattctgagggtggggggagggacatgaaatcatcttagcttagctttctgtctgtgaatgtctatatagtgtattgtgtgttttaacaaatgatttacactgactgttgctgtaaaagtgaatttggaaataaagttattactctgattaaa

SEQ ID NO: 410 - DNA, 5525 bp, Artificial Sequence
  Description of Artificial Sequence: Synthetic polynucleotide
gcagtcaccgccacccaccagctccggcaccaacagcagcgccgctgccaccgcccaccttctgccgccgccaccacagccaccttctcctcctccgctgtcctctcccgtcctcgcctctgtcgactatcagacaggctctgctgatgctgtccctctcctgttcagtcgtgccctcaccgttaaagagaaagagcaaactgctgggcagcagcattgatttttttaatgaagtggaaagagagctgggaataacaagtcgggcccacctcacctgcctcacctggtgaactttgaaccaggatggctgagccccgccaggagttcgaagtgatggaagatcacgctgggacgtacgggttgggggacaggaaagatcaggggggctacaccatgcaccaagaccaagagggtgacacggacgctggcctgaaagctgaagaagcaggcattggagacacccccagcctggaagacgaagctgctggtcacgtgacccaagctcgcatggtcagtaaaagcaaagacgggactggaagcgatgacaaaaaagccaagggggctgatggtaaaacgaagatcgccacaccgcggggagcagcccctccaggccagaagggccaggccaacgccaccaggattccagcaaaaaccccgcccgctccaaagacaccacccagctctggtgaacctccaaaatcaggggatcgcagcggctacagcagccccggctccccaggcactcccggcagccgctcccgcaccccgtcccttccaaccccacccacccgggagcccaagaaggtggcagtggtccgtactccacccaagtcgccgtcttccgccaagagccgcctgcagacagcccccgtgcccatgccagacctgaagaatgtcaagtccaagatcggctccactgagaacctgaagcaccagccgggaggcgggaaggtgcaaatagtctacaaaccagttgacctgagcaaggtgacctccaagtgtggctcattaggcaacatccatcataaaccaggaggtggccaggtggaagtaaaatctgagaagcttgacttcaaggacagagtccagtcgaagattgggtccctggacaatatcacccacgtccctggcggaggaaataaaaagattgaaacccacaagctgaccttccgcgagaacgccaaagccaagacagaccacggggcggagatcgtgtacaagtcgccagtggtgtctggggacacgtctccacggcatctcagcaatgtctcctccaccggcagcatcgacatggtagactcgccccagctcgccacgctagctgacgaggtgtctgcctccctggccaagcagggtttgtgatcaggcccctggggcggtcaataattgtggagaggagagaatgagagagtgtggaaaaaaaaagaataatgacccggcccccgccctctgcccccagctgctcctcgcagttcggttaattggttaatcacttaacctgcttttgtcactcggctttggctcgggacttcaaaatcagtgatgggagtaagagcaaatttcatctttccaaattgatgggtgggctagtaataaaatatttaaaaaaaaacattcaaaaacatggccacatccaacatttcctcaggcaattccttttgattcttttttcttccccctccatgtagaagagggagaaggagaggctctgaaagctgcttctgggggatttcaagggactgggggtgccaaccacctctggccctgttgtgggggtgtcacagaggcagtggcagcaacaaaggatttgaaacttggtgtgttcgtggagccacaggcagacgatgtcaaccttgtgtgagtgtgacgggggttggggtggggcgggaggccacgggggaggccgaggcaggggctgggcagaggggagaggaagcacaagaagtgggagtgggagaggaagccacgtgctggagagtagacatccccctccttgccgctgggagagccaaggcctatgccacctgcagcgtctgagcggccgcctgtccttggtggccgggggtgggggcctgctgtgggtcagtgtgccaccctctgcagggcagcctgtgggagaagggacagcgggtaaaaagagaaggcaagctggcaggagggtggcacttcgtggatgacctccttagaaaagactgaccttgatgtcttgagagcgctggcctcttcctccctccctgcagggtagggggcctgagttgaggggcttccctctgctccacagaaaccctgttttattgagttctgaaggttggaactgctgccatgattttggccactttgcagacctgggactttagggctaaccagttctctttgtaaggacttgtgcctcttgggagacgtccacccgtttccaagcctgggccactggcatctctggagtgtgtgggggtctgggaggcaggtcccgagccccctgtccttcccacggccactgcagtcaccccgtctgcgccgctgtgctgttgtctgccgtgagagcccaatcactgcctatacccctcatcacacgtcacaatgtcccgaattcccagcctcaccaccccttctcagtaatgaccctggttggttgcaggaggtacctactccatactgagggtgaaattaagggaaggcaaagtccaggcacaagagtgggaccccagcctctcactctcagttccactcatccaactgggaccctcaccacgaatctcatgatctgattcggttccctgtctcctcctcccgtcacagatgtgagccagggcactgctcagctgtgaccctaggtgtttctgccttgttgacatggagagagccctttcccctgagaaggcctggccccttcctgtgctgagcccacagcagcaggctgggtgtcttggttgtcagtggtggcaccaggatggaagggcaaggcacccagggcaggcccacagtcccgctgtcccccacttgcaccctagcttgtagctgccaacctcccagacagcccagcccgctgctcagctccacatgcatagtatcagccctccacacccgacaaaggggaacacacccccttggaaatggttcttttcccccagtcccagctggaagccatgctgtctgttctgctggagcagctgaacatatacatagatgttgccctgccctccccatctgcaccctgttgagttgtagttggatttgtctgtttatgcttggattcaccagagtgactatgatagtgaaaagaaaaaaaaaaaaaaaaaaggacgcatgtatcttgaaatgcttgtaaagaggtttctaacccaccctcacgaggtgtctctcacccccacactgggactcgtgtggcctgtgtggtgccaccctgctggggcctcccaagttttgaaaggctttcctcagcacctgggacccaacagagaccagcttctagcagctaaggaggccgttcagctgtgacgaaggcctgaagcacaggattaggactgaagcgatgatgtccccttccctacttccccttggggctccctgtgtcagggcacagactaggtcttgtggctggtctggcttgcggcgcgaggatggttctctctggtcatagcccgaagtctcatggcagtcccaaaggaggcttacaactcctgcatcacaagaaaaaggaagccactgccagctggggggatctgcagctcccagaagctccgtgagcctcagccacccctcagactgggttcctctccaagctcgccctctggaggggcagcgcagcctcccaccaagggccctgcgaccacagcagggattgggatgaattgcctgtcctggatctgctctagaggcccaagctgcctgcctgaggaaggatgacttgacaagtcaggagacactgttcccaaagccttgaccagagcacctcagcccgctgaccttgcacaaactccatctgctgccatgagaaaagggaagccgcctttgcaaaacattgctgcctaaagaaactcagcagcctcaggcccaattctgccacttctggtttgggtacagttaaaggcaaccctgagggacttggcagtagaaatccagggcctcccctggggctggcagcttcgtgtgcagctagagctttacctgaaaggaagtctctgggcccagaactctccaccaagagcctccctgccgttcgctgagtcccagcaattctcctaagttgaagggatctgagaaggagaaggaaatgtggggtagatttggtggtggttagagatatgcccccctcattactgccaacagtttcggctgcatttcttcacgcacctcggttcctcttcctgaagttcttgtgccctgctcttcagcaccatgggccttcttatacggaaggctctgggatctcccccttgtggggcaggctcttggggccagcctaagatcatggtttagggtgatcagtgctggcagataaattgaaaaggcacgctggcttgtgatcttaaatgaggacaatccccccagggctgggcactcctcccctcccctcacttctcccacctgcagagccagtgtccttgggtgggctagataggatatactgtatgccggctccttcaagctgctgactcactttatcaatagttccatttaaattgacttcagtggtgagactgtatcctgtttgctattgcttgttgtgctatggggggaggggggaggaatgtgtaagatagttaacatgggcaaagggagatcttggggtgcagcacttaaactgcctcgtaacccttttcatgatttcaaccacatttgctagagggagggagcagccacggagttagaggcccttggggtttctcttttccactgacaggctttcccaggcagctggctagttcattccctccccagccaggtgcaggcgtaggaatatggacatctggttgctttggcctgctgccctctttcaggggtcctaagcccacaatcatgcctccctaagaccttggcatccttccctctaagccgttggcacctctgtgccacctctcacactggctccagacacacagcctgtgcttttggagctgagatcactcgcttcaccctcctcatctttgttctccaagtaaagccacgaggtcggggcgagggcagaggtgatcacctgcgtgtcccatctacagacctgcagcttcataaaacttctgatttctcttcagctttgaaaagggttaccctgggcactggcctagagcctcacctcctaatagacttagccccatgagtttgccatgttgagcaggactatttctggcacttgcaagtcccatgatttcttcggtaattctgagggtggggggagggacatgaaatcatcttagcttagctttctgtctgtgaatgtctatatagtgtattgtgtgttttaacaaatgatttacactgactgttgctgtaaaagtgaatttggaaataaagttattactctgattaaa

SEQ ID NO: 411 - DNA, 6881 bp, Artificial Sequence
  Description of Artificial Sequence: Synthetic polynucleotide
acccctcgccgcaccacacacagcgcgggcttctagcgctcggcaccggcgggccaggcgcgtcctgccttcatttatccagcagcttttcggaaaatgcatttgctgttcggagtttaatcagaagaggattcctgcctccgtccccggctccttcatcgtcccctctcccctgtctctctcctggggaggcgtgaagcggtcccgtggatagagattcatgcctgtgcccgcgcgtgtgtgcgcgcgtgtaaattgccgagaaggggaaaacatcacaggacttctgcgaataccggactgaaaattgtaattcatctgccgccgccgctgccttttttttttctcgagctcttgagatctccggttgggattcctgcggattgacatttctgtgaagcagaagtctgggaatcgatctggaaatcctcctaatttttactccctctccccgcgactcctgattcattgggaagtttcaaatcagctataactggagagtgctgaagattgatgggatcgttgccttatgcatttgttttggttttacaaaaaggaaacttgacagaggatcatgctgtacttaaaaaatacaacatcacagaggaagtagactgatattaacaatacttactaataataacgtgcctcatgaaataaagatccgaaaggaattggaataaaaatttcctgcatctcatgccaagggggaaacaccagaatcaagtgttccgcgtgattgaagacaccccctcgtccaagaatgcaaagcacatccaataaaatagctggattataactcctcttctttctctgggggccgtggggtgggagctggggcgagaggtgccgttggcccccgttgcttttcctctgggaaggatggcgcacgctgggagaacagggtacgataaccgggagatagtgatgaagtacatccattataagctgtcgcagaggggctacgagtgggatgcgggagatgtgggcgccgcgcccccgggggccgcccccgcaccgggcatcttctcctcccagcccgggcacacgccccatccagccgcatcccgggacccggtcgccaggacctcgccgctgcagaccccggctgcccccggcgccgccgcggggcctgcgctcagcccggtgccacctgtggtccacctgaccctccgccaggccggcgacgacttctcccgccgctaccgccgcgacttcgccgagatgtccagccagctgcacctgacgcccttcaccgcgcggggacgctttgccacggtggtggaggagctcttcagggacggggtgaactgggggaggattgtggccttctttgagttcggtggggtcatgtgtgtggagagcgtcaaccgggagatgtcgcccctggtggacaacatcgccctgtggatgactgagtacctgaaccggcacctgcacacctggatccaggataacggaggctgggatgcctttgtggaactgtacggccccagcatgcggcctctgtttgatttctcctggctgtctctgaagactctgctcagtttggccctggtgggagcttgcatcaccctgggtgcctatctgggccacaagtgaagtcaacatgcctgccccaaacaaatatgcaaaaggttcactaaagcagtagaaataatatgcattgtcagtgatgtaccatgaaacaaagctgcaggctgtttaagaaaaaataacacacatataaacatcacacacacagacagacacacacacacacaacaattaacagtcttcaggcaaaacgtcgaatcagctatttactgccaaagggaaatatcatttattttttacattattaagaaaaaaagatttatttatttaagacagtcccatcaaaactcctgtctttggaaatccgaccactaattgccaagcaccgcttcgtgtggctccacctggatgttctgtgcctgtaaacatagattcgctttccatgttgttggccggatcaccatctgaagagcagacggatggaaaaaggacctgatcattggggaagctggctttctggctgctggaggctggggagaaggtgttcattcacttgcatttctttgccctgggggctgtgatattaacagagggagggttcctgtggggggaagtccatgcctccctggcctgaagaagagactctttgcatatgactcacatgatgcatacctggtgggaggaaaagagttgggaacttcagatggacctagtacccactgagatttccacgccgaaggacagcgatgggaaaaatgcccttaaatcataggaaagtatttttttaagctaccaattgtgccgagaaaagcattttagcaatttatacaatatcatccagtaccttaagccctgattgtgtatattcatatattttggatacgcaccccccaactcccaatactggctctgtctgagtaagaaacagaatcctctggaacttgaggaagtgaacatttcggtgacttccgcatcaggaaggctagagttacccagagcatcaggccgccacaagtgcctgcttttaggagaccgaagtccgcagaacctgcctgtgtcccagcttggaggcctggtcctggaactgagccggggccctcactggcctcctccagggatgatcaacagggcagtgtggtctccgaatgtctggaagctgatggagctcagaattccactgtcaagaaagagcagtagaggggtgtggctgggcctgtcaccctggggccctccaggtaggcccgttttcacgtggagcatgggagccacgacccttcttaagacatgtatcactgtagagggaaggaacagaggccctgggcccttcctatcagaaggacatggtgaaggctgggaacgtgaggagaggcaatggccacggcccattttggctgtagcacatggcacgttggctgtgtggccttggcccacctgtgagtttaaagcaaggctttaaatgactttggagagggtcacaaatcctaaaagaagcattgaagtgaggtgtcatggattaattgacccctgtctatggaattacatgtaaaacattatcttgtcactgtagtttggttttatttgaaaacctgacaaaaaaaaagttccaggtgtggaatatgggggttatctgtacatcctggggcattaaaaaaaaaatcaatggtggggaactataaagaagtaacaaaagaagtgacatcttcagcaaataaactaggaaatttttttttcttccagtttagaatcagccttgaaacattgatggaataactctgtggcattattgcattatataccatttatctgtattaactttggaatgtactctgttcaatgtttaatgctgtggttgatatttcgaaagctgctttaaaaaaatacatgcatctcagcgtttttttgtttttaattgtatttagttatggcctatacactatttgtgagcaaaggtgatcgttttctgtttgagatttttatctcttgattcttcaaaagcattctgagaaggtgagataagccctgagtctcagctacctaagaaaaacctggatgtcactggccactgaggagctttgtttcaaccaagtcatgtgcatttccacgtcaacagaattgtttattgtgacagttatatctgttgtccctttgaccttgtttcttgaaggtttcctcgtccctgggcaattccgcatttaattcatggtattcaggattacatgcatgtttggttaaacccatgagattcattcagttaaaaatccagatggcaaatgaccagcagattcaaatctatggtggtttgacctttagagagttgctttacgtggcctgtttcaacacagacccacccagagccctcctgccctccttccgcgggggctttctcatggctgtccttcagggtcttcctgaaatgcagtggtgcttacgctccaccaagaaagcaggaaacctgtggtatgaagccagacctccccggcgggcctcagggaacagaatgatcagacctttgaatgattctaatttttaagcaaaatattattttatgaaaggtttacattgtcaaagtgatgaatatggaatatccaatcctgtgctgctatcctgccaaaatcattttaatggagtcagtttgcagtatgctccacgtggtaagatcctccaagctgctttagaagtaacaatgaagaacgtggacgtttttaatataaagcctgttttgtcttttgttgttgttcaaacgggattcacagagtatttgaaaaatgtatatatattaagaggtcacgggggctaattgctggctggctgccttttgctgtggggttttgttacctggttttaataacagtaaatgtgcccagcctcttggccccagaactgtacagtattgtggctgcacttgctctaagagtagttgatgttgcattttccttattgttaaaaacatgttagaagcaatgaatgtatataaaagcctcaactagtcatttttttctcctcttcttttttttcattatatctaattattttgcagttgggcaacagagaaccatccctattttgtattgaagagggattcacatctgcatcttaactgctctttatgaatgaaaaaacagtcctctgtatgtactcctctttacactggccagggtcagagttaaatagagtatatgcactttccaaattggggacaagggctctaaaaaaagccccaaaaggagaagaacatctgagaacctcctcggccctcccagtccctcgctgcacaaatactccgcaagagaggccagaatgacagctgacagggtctatggccatcgggtcgtctccgaagatttggcaggggcagaaaactctggcaggcttaagatttggaataaagtcacagaattaaggaagcacctcaatttagttcaaacaagacgccaacattctctccacagctcacttacctctctgtgttcagatgtggccttccatttatatgtgatctttgttttattagtaaatgcttatcatctaaagatgtagctctggcccagtgggaaaaattaggaagtgattataaatcgagaggagttataataatcaagattaaatgtaaataatcagggcaatcccaacacatgtctagctttcacctccaggatctattgagtgaacagaattgcaaatagtctctatttgtaattgaacttatcctaaaacaaatagtttataaatgtgaacttaaactctaattaattccaactgtacttttaaggcagtggctgtttttagactttcttatcacttatagttagtaatgtacacctactctatcagagaaaaacaggaaaggctcgaaatacaagccattctaaggaaattagggagtcagttgaaattctattctgatcttattctgtggtgtcttttgcagcccagacaaatgtggttacacactttttaagaaatacaattctacattgtcaagcttatgaaggttccaatcagatctttattgttattcaatttggatctttcagggattttttttttaaattattatgggacaaaggacatttgttggaggggtgggagggaggaagaatttttaaatgtaaaacattcccaagtttggatcagggagttggaagttttcagaataaccagaactaagggtatgaaggacctgtattggggtcgatgtgatgcctctgcgaagaaccttgtgtgacaaatgagaaacattttgaagtttgtggtacgacctttagattccagagacatcagcatggctcaaagtgcagctccgtttggcagtgcaatggtataaatttcaagctggatatgtctaatgggtatttaaacaataaatgtgcagttttaactaacaggatatttaatgacaaccttctggttggtagggacatctgtttctaaatgtttattatgtacaatacagaaaaaaattttataaaattaagcaatgtgaaactgaattggagagtgataatacaagtcctttagtcttacccagtgaatcattctgttccatgtctttggacaaccatgaccttggacaatcatgaaatatgcatctcactggatgcaaagaaaatcagatggagcatgaatggtactgtaccggttcatctggactgccccagaaaaataacttcaagcaaacatcctatcaacaacaaggttgttctgcataccaagctgagcacagaagatgggaacactggtggaggatggaaaggctcgctcaatcaagaaaattctgagactattaataaataagactgtagtgtagatactgagtaaatccatgcacctaaaccttttggaaaatctgccgtgggccctccagatagctcatttcattaagtttttccctccaaggtagaatttgcaagagtgacagtggattgcatttcttttggggaagctttcttttggtggttttgtttattataccttcttaagttttcaaccaaggtttgcttttgttttgagttactggggttatttttgttttaaataaaaataagtgtacaataagtgtttttgtattgaaagcttttgttatcaagattttcatacttttaccttccatggctctttttaagattgatacttttaagaggtggctgatattctgcaacactgtacacataaaaaatacggtaaggatactttacatggttaaggtaaagtaagtctccagttggccaccattagctataatggcactttgtttgtgttgttggaaaaagtcacattgccattaaactttccttgtctgtctagttaatattgtgaagaaaaataaagtacagtgtgagatactg

SEQ ID NO: 412 - DNA, 1595 bp, Artificial Sequence
  Description of Artificial Sequence: Synthetic polynucleotide
acccctcgccgcaccacacacagcgcgggcttctagcgctcggcaccggcgggccaggcgcgtcctgccttcatttatccagcagcttttcggaaaatgcatttgctgttcggagtttaatcagaagaggattcctgcctccgtccccggctccttcatcgtcccctctcccctgtctctctcctggggaggcgtgaagcggtcccgtggatagagattcatgcctgtgcccgcgcgtgtgtgcgcgcgtgtaaattgccgagaaggggaaaacatcacaggacttctgcgaataccggactgaaaattgtaattcatctgccgccgccgctgccttttttttttctcgagctcttgagatctccggttgggattcctgcggattgacatttctgtgaagcagaagtctgggaatcgatctggaaatcctcctaatttttactccctctccccgcgactcctgattcattgggaagtttcaaatcagctataactggagagtgctgaagattgatgggatcgttgccttatgcatttgttttggttttacaaaaaggaaacttgacagaggatcatgctgtacttaaaaaatacaacatcacagaggaagtagactgatattaacaatacttactaataataacgtgcctcatgaaataaagatccgaaaggaattggaataaaaatttcctgcatctcatgccaagggggaaacaccagaatcaagtgttccgcgtgattgaagacaccccctcgtccaagaatgcaaagcacatccaataaaatagctggattataactcctcttctttctctgggggccgtggggtgggagctggggcgagaggtgccgttggcccccgttgcttttcctctgggaaggatggcgcacgctgggagaacagggtacgataaccgggagatagtgatgaagtacatccattataagctgtcgcagaggggctacgagtgggatgcgggagatgtgggcgccgcgcccccgggggccgcccccgcaccgggcatcttctcctcccagcccgggcacacgccccatccagccgcatcccgggacccggtcgccaggacctcgccgctgcagaccccggctgcccccggcgccgccgcggggcctgcgctcagcccggtgccacctgtggtccacctgaccctccgccaggccggcgacgacttctcccgccgctaccgccgcgacttcgccgagatgtccagccagctgcacctgacgcccttcaccgcgcggggacgctttgccacggtggtggaggagctcttcagggacggggtgaactgggggaggattgtggccttctttgagttcggtggggtcatgtgtgtggagagcgtcaaccgggagatgtcgcccctggtggacaacatcgccctgtggatgactgagtacctgaaccggcacctgcacacctggatccaggataacggaggctgggtaggtgcacttggtgatgtgagtctgggctgaggccacaggtccgagatgcgggggttggagtgcgggtgggctcctggggcaatgggaggctgtggagccggcgaaataaaatcagagttgttgct

SEQ ID NO: 413 - DNA, 72 bp, Artificial Sequence
  Description of Artificial Sequence: Synthetic oligonucleotide
tgtcgggtagcttatcagactgatgttgactgttgaatctcatggcaacaccagtcgatgggctgtctgaca

SEQ ID NO: 414 - DNA, 3661 bp, Artificial Sequence
  Description of Artificial Sequence: Synthetic polynucleotide
cttcagatagattatatctggagtgaagaatcctgccacctatgtatctggcatagtattctgtgtagtgggatgagcagagaacaaaaacaaaataatccagtgagaaaagcccgtaaataaaccttcagaccagagatctattctctagcttattttaagctcaacttaaaaagaagaactgttctctgattcttttcgccttcaatacacttaatgatttaactccaccctccttcaaaagaaacagcatttcctacttttatactgtctatatgattgatttgcacagctcatctggccagaagagctgagacatccgttcccctacaagaaactctccccgggtggaacaagatggattatcaagtgtcaagtccaatctatgacatcaattattatacatcggagccctgccaaaaaatcaatgtgaagcaaatcgcagcccgcctcctgcctccgctctactcactggtgttcatctttggttttgtgggcaacatgctggtcatcctcatcctgataaactgcaaaaggctgaagagcatgactgacatctacctgctcaacctggccatctctgacctgtttttccttcttactgtccccttctgggctcactatgctgccgcccagtgggactttggaaatacaatgtgtcaactcttgacagggctctattttataggcttcttctctggaatcttcttcatcatcctcctgacaatcgataggtacctggctgtcgtccatgctgtgtttgctttaaaagccaggacggtcacctttggggtggtgacaagtgtgatcacttgggtggtggctgtgtttgcgtctctcccaggaatcatctttaccagatctcaaaaagaaggtcttcattacacctgcagctctcattttccatacagtcagtatcaattctggaagaatttccagacattaaagatagtcatcttggggctggtcctgccgctgcttgtcatggtcatctgctactcgggaatcctaaaaactctgcttcggtgtcgaaatgagaagaagaggcacagggctgtgaggcttatcttcaccatcatgattgtttattttctcttctgggctccctacaacattgtccttctcctgaacaccttccaggaattctttggcctgaataattgcagtagctctaacaggttggaccaagctatgcaggtgacagagactcttgggatgacgcactgctgcatcaaccccatcatctatgcctttgtcggggagaagttcagaaactacctcttagtcttcttccaaaagcacattgccaaacgcttctgcaaatgctgttctattttccagcaagaggctcccgagcgagcaagctcagtttacacccgatccactggggagcaggaaatatctgtgggcttgtgacacggactcaagtgggctggtgacccagtcagagttgtgcacatggcttagttttcatacacagcctgggctgggggtggggtgggagaggtcttttttaaaaggaagttactgttatagagggtctaagattcatccatttatttggcatctgtttaaagtagattagatcttttaagcccatcaattatagaaagccaaatcaaaatatgttgatgaaaaatagcaacctttttatctccccttcacatgcatcaagttattgacaaactctcccttcactccgaaagttccttatgtatatttaaaagaaagcctcagagaattgctgattcttgagtttagtgatctgaacagaaataccaaaattatttcagaaatgtacaactttttacctagtacaaggcaacatataggttgtaaatgtgtttaaaacaggtctttgtcttgctatggggagaaaagacatgaatatgattagtaaagaaatgacacttttcatgtgtgatttcccctccaaggtatggttaataagtttcactgacttagaaccaggcgagagacttgtggcctgggagagctggggaagcttcttaaatgagaaggaatttgagttggatcatctattgctggcaaagacagaagcctcactgcaagcactgcatgggcaagcttggctgtagaaggagacagagctggttgggaagacatggggaggaaggacaaggctagatcatgaagaaccttgacggcattgctccgtctaagtcatgagctgagcagggagatcctggttggtgttgcagaaggtttactctgtggccaaaggagggtcaggaaggatgagcatttagggcaaggagaccaccaacagccctcaggtcagggtgaggatggcctctgctaagctcaaggcgtgaggatgggaaggagggaggtattcgtaaggatgggaaggagggaggtattcgtgcagcatatgaggatgcagagtcagcagaactggggtggatttgggttggaagtgagggtcagagaggagtcagagagaatccctagtcttcaagcagattggagaaacccttgaaaagacatcaagcacagaaggaggaggaggaggtttaggtcaagaagaagatggattggtgtaaaaggatgggtctggtttgcagagcttgaacacagtctcacccagactccaggctgtctttcactgaatgcttctgacttcatagatttccttcccatcccagctgaaatactgaggggtctccaggaggagactagatttatgaatacacgaggtatgaggtctaggaacatacttcagctcacacatgagatctaggtgaggattgattacctagtagtcatttcatgggttgttgggaggattctatgaggcaaccacaggcagcatttagcacatactacacattcaataagcatcaaactcttagttactcattcagggatagcactgagcaaagcattgagcaaaggggtcccatagaggtgagggaagcctgaaaaactaagatgctgcctgcccagtgcacacaagtgtaggtatcattttctgcatttaaccgtcaataggcaaaggggggaagggacatattcatttggaaataagctgccttgagccttaaaacccacaaaagtacaatttaccagcctccgtatttcagactgaatgggggtggggggggcgccttaggtacttattccagatgccttctccagacaaaccagaagcaacagaaaaaatcgtctctccctccctttgaaatgaatataccccttagtgtttgggtatattcatttcaaagggagagagagaggtttttttctgttctgtctcatatgattgtgcacatacttgagactgttttgaatttgggggatggctaaaaccatcatagtacaggtaaggtgagggaatagtaagtggtgagaactactcagggaatgaaggtgtcagaataataagaggtgctactgactttctcagcctctgaatatgaacggtgagcattgtggctgtcagcaggaagcaacgaagggaaatgtctttccttttgctcttaagttgtggagagtgcaacagtagcataggaccctaccctctgggccaagtcaaagacattctgacatcttagtatttgcatattcttatgtatgtgaaagttacaaattgcttgaaagaaaatatgcatctaataaaaaacaccttctaaaataa

SEQ ID NO: 415 - DNA, 895 bp, Artificial Sequence
  Description of Artificial Sequence: Synthetic polynucleotide
gcgtcgtagtctcctgcagcgtctggggtttccgttgcagtcctcggaaccaggacctcggcgtggcctagcgagttatggcgacgaaggccgtgtgcgtgctgaagggcgacggcccagtgcagggcatcatcaatttcgagcagaaggaaagtaatggaccagtgaaggtgtggggaagcattaaaggactgactgaaggcctgcatggattccatgttcatgagtttggagataatacagcaggctgtaccagtgcaggtcctcactttaatcctctatccagaaaacacggtgggccaaaggatgaagagaggcatgttggagacttgggcaatgtgactgctgacaaagatggtgtggccgatgtgtctattgaagattctgtgatctcactctcaggagaccattgcatcattggccgcacactggtggtccatgaaaaagcagatgacttgggcaaaggtggaaatgaagaaagtacaaagacaggaaacgctggaagtcgtttggcttgtggtgtaattgggatcgcccaataaacattcccttggatgtagtctgaggccccttaactcatctgttatcctgctagctgtagaaatgtatcctgataaacattaaacactgtaatcttaaaagtgtaattgtgtgactttttcagagttgctttaaagtacctgtagtgagaaactgatttatgatcacttggaagatttgtatagttttataaaactcagttaaaatgtctgtttcaatgacctgtattttgccagacttaaatcacagatgggtattaaacttgtcagaatttctttgtcattcaagcctgtgaataaaaaccctgtatggcacttattatgaggctattaaaagaatccaaattcaaactaaa

SEQ ID NO: 416 - DNA, 9905 bp, Artificial Sequence
  Description of Artificial Sequence: Synthetic polynucleotide
agacgtccgggcagcccccggcgcagcgcggccgcagcagcctccgccccccgcacggtgtgagcgcccgacgcggccgaggcggccggagtcccgagctagccccggcggccgccgccgcccagaccggacgacaggccacctcgtcggcgtccgcccgagtccccgcctcgccgccaacgccacaaccaccgcgcacggccccctgactccgtccagtattgatcgggagagccggagcgagctcttcggggagcagcgatgcgaccctccgggacggccggggcagcgctcctggcgctgctggctgcgctctgcccggcgagtcgggctctggaggaaaagaaagtttgccaaggcacgagtaacaagctcacgcagttgggcacttttgaagatcattttctcagcctccagaggatgttcaataactgtgaggtggtccttgggaatttggaaattacctatgtgcagaggaattatgatctttccttcttaaagaccatccaggaggtggctggttatgtcctcattgccctcaacacagtggagcgaattcctttggaaaacctgcagatcatcagaggaaatatgtactacgaaaattcctatgccttagcagtcttatctaactatgatgcaaataaaaccggactgaaggagctgcccatgagaaatttacaggaaatcctgcatggcgccgtgcggttcagcaacaaccctgccctgtgcaacgtggagagcatccagtggcgggacatagtcagcagtgactttctcagcaacatgtcgatggacttccagaaccacctgggcagctgccaaaagtgtgatccaagctgtcccaatgggagctgctggggtgcaggagaggagaactgccagaaactgaccaaaatcatctgtgcccagcagtgctccgggcgctgccgtggcaagtcccccagtgactgctgccacaaccagtgtgctgcaggctgcacaggcccccgggagagcgactgcctggtctgccgcaaattccgagacgaagccacgtgcaaggacacctgccccccactcatgctctacaaccccaccacgtaccagatggatgtgaaccccgagggcaaatacagctttggtgccacctgcgtgaagaagtgtccccgtaattatgtggtgacagatcacggctcgtgcgtccgagcctgtggggccgacagctatgagatggaggaagacggcgtccgcaagtgtaagaagtgcgaagggccttgccgcaaagtgtgtaacggaataggtattggtgaatttaaagactcactctccataaatgctacgaatattaaacacttcaaaaactgcacctccatcagtggcgatctccacatcctgccggtggcatttaggggtgactccttcacacatactcctcctctggatccacaggaactggatattctgaaaaccgtaaaggaaatcacagggtttttgctgattcaggcttggcctgaaaacaggacggacctccatgcctttgagaacctagaaatcatacgcggcaggaccaagcaacatggtcagttttctcttgcagtcgtcagcctgaacataacatccttgggattacgctccctcaaggagataagtgatggagatgtgataatttcaggaaacaaaaatttgtgctatgcaaatacaataaactggaaaaaactgtttgggacctccggtcagaaaaccaaaattataagcaacagaggtgaaaacagctgcaaggccacaggccaggtctgccatgccttgtgctcccccgagggctgctggggcccggagcccagggactgcgtctcttgccggaatgtcagccgaggcagggaatgcgtggacaagtgcaaccttctggagggtgagccaagggagtttgtggagaactctgagtgcatacagtgccacccagagtgcctgcctcaggccatgaacatcacctgcacaggacggggaccagacaactgtatccagtgtgcccactacattgacggcccccactgcgtcaagacctgcccggcaggagtcatgggagaaaacaacaccctggtctggaagtacgcagacgccggccatgtgtgccacctgtgccatccaaactgcacctacggatgcactgggccaggtcttgaaggctgtccaacgaatgggcctaagatcccgtccatcgccactgggatggtgggggccctcctcttgctgctggtggtggccctggggatcggcctcttcatgcgaaggcgccacatcgttcggaagcgcacgctgcggaggctgctgcaggagagggagcttgtggagcctcttacacccagtggagaagctcccaaccaagctctcttgaggatcttgaaggaaactgaattcaaaaagatcaaagtgctgggctccggtgcgttcggcacggtgtataagggactctggatcccagaaggtgagaaagttaaaattcccgtcgctatcaaggaattaagagaagcaacatctccgaaagccaacaaggaaatcctcgatgaagcctacgtgatggccagcgtggacaacccccacgtgtgccgcctgctgggcatctgcctcacctccaccgtgcagctcatcacgcagctcatgcccttcggctgcctcctggactatgtccgggaacacaaagacaatattggctcccagtacctgctcaactggtgtgtgcagatcgcaaagggcatgaactacttggaggaccgtcgcttggtgcaccgcgacctggcagccaggaacgtactggtgaaaacaccgcagcatgtcaagatcacagattttgggctggccaaactgctgggtgcggaagagaaagaataccatgcagaaggaggcaaagtgcctatcaagtggatggcattggaatcaattttacacagaatctatacccaccagagtgatgtctggagctacggggtgactgtttgggagttgatgacctttggatccaagccatatgacggaatccctgccagcgagatctcctccatcctggagaaaggagaacgcctccctcagccacccatatgtaccatcgatgtctacatgatcatggtcaagtgctggatgatagacgcagatagtcgcccaaagttccgtgagttgatcatcgaattctccaaaatggcccgagacccccagcgctaccttgtcattcagggggatgaaagaatgcatttgccaagtcctacagactccaacttctaccgtgccctgatggatgaagaagacatggacgacgtggtggatgccgacgagtacctcatcccacagcagggcttcttcagcagcccctccacgtcacggactcccctcctgagctctctgagtgcaaccagcaacaattccaccgtggcttgcattgatagaaatgggctgcaaagctgtcccatcaaggaagacagcttcttgcagcgatacagctcagaccccacaggcgccttgactgaggacagcatagacgacaccttcctcccagtgcctgaatacataaaccagtccgttcccaaaaggcccgctggctctgtgcagaatcctgtctatcacaatcagcctctgaaccccgcgcccagcagagacccacactaccaggacccccacagcactgcagtgggcaaccccgagtatctcaacactgtccagcccacctgtgtcaacagcacattcgacagccctgcccactgggcccagaaaggcagccaccaaattagcctggacaaccctgactaccagcaggacttctttcccaaggaagccaagccaaatggcatctttaagggctccacagctgaaaatgcagaatacctaagggtcgcgccacaaagcagtgaatttattggagcatgaccacggaggatagtatgagccctaaaaatccagactctttcgatacccaggaccaagccacagcaggtcctccatcccaacagccatgcccgcattagctcttagacccacagactggttttgcaacgtttacaccgactagccaggaagtacttccacctcgggcacattttgggaagttgcattcctttgtcttcaaactgtgaagcatttacagaaacgcatccagcaagaatattgtccctttgagcagaaatttatctttcaaagaggtatatttgaaaaaaaaaaaaagtatatgtgaggatttttattgattggggatcttggagtttttcattgtcgctattgatttttacttcaatgggctcttccaacaaggaagaagcttgctggtagcacttgctaccctgagttcatccaggcccaactgtgagcaaggagcacaagccacaagtcttccagaggatgcttgattccagtggttctgcttcaaggcttccactgcaaaacactaaagatccaagaaggccttcatggccccagcaggccggatcggtactgtatcaagtcatggcaggtacagtaggataagccactctgtcccttcctgggcaaagaagaaacggaggggatggaattcttccttagacttacttttgtaaaaatgtccccacggtacttactccccactgatggaccagtggtttccagtcatgagcgttagactgacttgtttgtcttccattccattgttttgaaactcagtatgctgcccctgtcttgctgtcatgaaatcagcaagagaggatgacacatcaaataataactcggattccagcccacattggattcatcagcatttggaccaatagcccacagctgagaatgtggaatacctaaggatagcaccgcttttgttctcgcaaaaacgtatctcctaatttgaggctcagatgaaatgcatcaggtcctttggggcatagatcagaagactacaaaaatgaagctgctctgaaatctcctttagccatcaccccaaccccccaaaattagtttgtgttacttatggaagatagttttctccttttacttcacttcaaaagctttttactcaaagagtatatgttccctccaggtcagctgcccccaaaccccctccttacgctttgtcacacaaaaagtgtctctgccttgagtcatctattcaagcacttacagctctggccacaacagggcattttacaggtgcgaatgacagtagcattatgagtagtgtggaattcaggtagtaaatatgaaactagggtttgaaattgataatgctttcacaacatttgcagatgttttagaaggaaaaaagttccttcctaaaataatttctctacaattggaagattggaagattcagctagttaggagcccaccttttttcctaatctgtgtgtgccctgtaacctgactggttaacagcagtcctttgtaaacagtgttttaaactctcctagtcaatatccaccccatccaatttatcaaggaagaaatggttcagaaaatattttcagcctacagttatgttcagtcacacacacatacaaaatgttccttttgcttttaaagtaatttttgactcccagatcagtcagagcccctacagcattgttaagaaagtatttgatttttgtctcaatgaaaataaaactatattcatttccactctattatgctctcaaatacccctaagcatctatactagcctggtatgggtatgaaagatacaaagataaataaaacatagtccctgattctaagaaattcacaatttagcaaaggaaatggactcatagatgctaaccttaaaacaacgtgacaaatgccagacaggacccatcagccaggcactgtgagagcacagagcagggaggttgggtcctgcctgaggagacctggaagggaggcctcacaggaggatgaccaggtctcagtcagcggggaggtggaaagtgcaggtgcatcaggggcaccctgaccgaggaaacagctgccagaggcctccactgctaaagtccacataaggctgaggtcagtcaccctaaacaacctgctccctctaagccaggggatgagcttggagcatcccacaagttccctaaaagttgcagcccccagggggattttgagctatcatctctgcacatgcttagtgagaagactacacaacatttctaagaatctgagattttatattgtcagttaaccactttcattattcattcacctcaggacatgcagaaatatttcagtcagaactgggaaacagaaggacctacattctgctgtcacttatgtgtcaagaagcagatgatcgatgaggcaggtcagttgtaagtgagtcacattgtagcattaaattctagtatttttgtagtttgaaacagtaacttaataaaagagcaaaagctattctagctttcttcttcatattttaattttccaccataaagtttagttgctaaattctattaattttaagattgtgcttcccaaaatagttctcacttcatctgtccagggaggcacagttctgtctggtagaagccgcaaagcccttagcctcttcacggatctggcgactgtgatgggcaggtcaggagaggagctgcccaaagtcccatgattttcacctaacagccctgatcagtcagtactcaaagcttggactccatccctgaaggtcttcctgattgatagcctggccttaataccctacagaaagcctgtccattggctgtttcttcctcagtcagttcctggaagaccttaccccatgaccccagcttcagatgtggtctttggaaacagaggtcgaaggaaagtaaggagctgagagctcacattcataggtgccgccagccttcgtgcatcttcttgcatcatctctaaggagctcctctaattacaccatgcccgtcaccccatgagggatcagagaagggatgagtcttctaaactctatattcgctgtgagtccaggttgtaagggggagcactgtggatgcatcctattgcactccagctgatgacaccaaagcttaggtgtttgctgaaagttcttgatgttgtgacttaccacccctgcctcacaactgcagacataaggggactatggattgcttagcaggaaaggcactggttctcaagggcggctgcccttgggaatcttctggtcccaaccagaaagactgtggcttgattttctcaggtgcagcccagccgtagggccttttcagagcaccccctggttattgcaacattcatcaaagtttctagaacctctggcctaaaggaagggcctggtgggatctacttggcactcgctggggggccaccccccagtgccactctcactaggcctctgattgcacttgtgtaggatgaagctggtgggtgatgggaactcagcacctcccctcaggcagaaaagaatcatctgtggagcttcaaaagaaggggcctggagtctctgcagaccaattcaacccaaatctcgggggctctttcatgattctaatgggcaaccagggttgaaacccttatttctagggtcttcagttgtacaagactgtgggtctgtaccagagcccccgtcagagtagaataaaaggctgggtagggtagagattcccatgtgcagtggagagaacaatctgcagtcactgataagcctgagacttggctcatttcaaaagcgttcaattcatcctcaccagcagttcagctggaaaggggcaaatacccccacctgagctttgaaaacgccctgggaccctctgcattctctaagtaagttatagaaaccagtctcttccctcctttgtgagtgagctgctattccacgtaggcaacacctgttgaaattgccctcaatgtctactctgcatttctttcttgtgataagcacacacttttattgcaacataatgatctgctcacatttccttgcctgggggctgtaaaaccttacagaacagaaatccttgcctctttcaccagccacacctgccataccaggggtacagctttgtactattgaagacacagacaggatttttaaatgtaaatctatttttgtaactttgttgcgggatatagttctctttatgtagcactgaactttgtacaatatatttttagaaactcatttttctactaaaacaaacacagtttactttagagagactgcaatagaatcaaaatttgaaactgaaatctttgtttaaaagggttaagttgaggcaagaggaaagccctttctctctcttataaaaaggcacaacctcattggggagctaagctaggtcattgtcatggtgaagaagagaagcatcgtttttatatttaggaaattttaaaagatgatggaaagcacatttagcttggtctgaggcaggttctgttggggcagtgttaatggaaagggctcactgttgttactactagaaaaatccagttgcatgccatactctcatcatctgccagtgtaaccctgtacatgtaagaaaagcaataacatagcactttgttggtttatatatataatgtgacttcaatgcaaattttatttttatatttacaattgatatgcatttaccagtataaactagacatgtctggagagcctaataatgttcagcacactttggttagttcaccaacagtcttaccaagcctgggcccagccaccctagagaagttattcagccctggctgcagtgacatcacctgaggagcttttaaaagcttgaagcccagctacacctcagaccgattaaacgcaaatctctggggctgaaacccaagcattcgtagtttttaaagctcctgaggtcattccaatgtgcggccaaagttgagaactactggcctagggattagccacaaggacatggacttggaggcaaattctgcaggtgtatgtgattctcaggcctagagagctaagacacaaagacctccacatctgtcgctgagagtcaagaacctgaacagagtttccatgaaggttctccaagcactagaagggagagtgtctaaacaatggttgaaaagcaaaggaaatataaaacagacacctctttccatttcctaaggtttctctctttattaagggtggactagtaataaaatataatattcttgctgcttatgcagctgacattgttgccctccctaaagcaaccaagtagcctttatttcccacagtgaaagaaaacgctggcctatcagttacattacaaaaggcagatttcaagaggattgagtaagtagttggatggctttcataaaaacaagaattcaagaagaggattcatgctttaagaaacatttgttatacattcctcacaaattatacctgggataaaaactatgtagcaggcagtgtgttttccttccatgtctctctgcactacctgcagtgtgtcctctgaggctgcaagtctgtcctatctgaattcccagcagaagcactaagaagctccaccctatcacctagcagataaaactatggggaaaacttaaatctgtgcatacatttctggatgcatttacttatctttaaaaaaaaaggaatcctatgacctgatttggccacaaaaataatcttgctgtacaatacaatctcttggaaattaagagatcctatggatttgatgactggtattagaggtgacaatgtaaccgattaacaacagacagcaataacttcgttttagaaacattcaagcaatagctttatagcttcaacatatggtacgttttaaccttgaaagttttgcaatgatgaaagcagtatttgtacaaatgaaaagcagaattctcttttatatggtttatactgttgatcagaaatgttgattgtgcattgagtattaaaaaattagatgtatattattcattgttctttactcctgagtaccttataataataataatgtattctttgttaacaa

SEQ ID NO: 417 - DNA, 9770 bp, Artificial Sequence
  Description of Artificial Sequence: Synthetic polynucleotide
agacgtccgggcagcccccggcgcagcgcggccgcagcagcctccgccccccgcacggtgtgagcgcccgacgcggccgaggcggccggagtcccgagctagccccggcggccgccgccgcccagaccggacgacaggccacctcgtcggcgtccgcccgagtccccgcctcgccgccaacgccacaaccaccgcgcacggccccctgactccgtccagtattgatcgggagagccggagcgagctcttcggggagcagcgatgcgaccctccgggacggccggggcagcgctcctggcgctgctggctgcgctctgcccggcgagtcgggctctggaggaaaagaaagtttgccaaggcacgagtaacaagctcacgcagttgggcacttttgaagatcattttctcagcctccagaggatgttcaataactgtgaggtggtccttgggaatttggaaattacctatgtgcagaggaattatgatctttccttcttaaagaccatccaggaggtggctggttatgtcctcattgccctcaacacagtggagcgaattcctttggaaaacctgcagatcatcagaggaaatatgtactacgaaaattcctatgccttagcagtcttatctaactatgatgcaaataaaaccggactgaaggagctgcccatgagaaatttacagggccaaaagtgtgatccaagctgtcccaatgggagctgctggggtgcaggagaggagaactgccagaaactgaccaaaatcatctgtgcccagcagtgctccgggcgctgccgtggcaagtcccccagtgactgctgccacaaccagtgtgctgcaggctgcacaggcccccgggagagcgactgcctggtctgccgcaaattccgagacgaagccacgtgcaaggacacctgccccccactcatgctctacaaccccaccacgtaccagatggatgtgaaccccgagggcaaatacagctttggtgccacctgcgtgaagaagtgtccccgtaattatgtggtgacagatcacggctcgtgcgtccgagcctgtggggccgacagctatgagatggaggaagacggcgtccgcaagtgtaagaagtgcgaagggccttgccgcaaagtgtgtaacggaataggtattggtgaatttaaagactcactctccataaatgctacgaatattaaacacttcaaaaactgcacctccatcagtggcgatctccacatcctgccggtggcatttaggggtgactccttcacacatactcctcctctggatccacaggaactggatattctgaaaaccgtaaaggaaatcacagggtttttgctgattcaggcttggcctgaaaacaggacggacctccatgcctttgagaacctagaaatcatacgcggcaggaccaagcaacatggtcagttttctcttgcagtcgtcagcctgaacataacatccttgggattacgctccctcaaggagataagtgatggagatgtgataatttcaggaaacaaaaatttgtgctatgcaaatacaataaactggaaaaaactgtttgggacctccggtcagaaaaccaaaattataagcaacagaggtgaaaacagctgcaaggccacaggccaggtctgccatgccttgtgctcccccgagggctgctggggcccggagcccagggactgcgtctcttgccggaatgtcagccgaggcagggaatgcgtggacaagtgcaaccttctggagggtgagccaagggagtttgtggagaactctgagtgcatacagtgccacccagagtgcctgcctcaggccatgaacatcacctgcacaggacggggaccagacaactgtatccagtgtgcccactacattgacggcccccactgcgtcaagacctgcccggcaggagtcatgggagaaaacaacaccctggtctggaagtacgcagacgccggccatgtgtgccacctgtgccatccaaactgcacctacggatgcactgggccaggtcttgaaggctgtccaacgaatgggcctaagatcccgtccatcgccactgggatggtgggggccctcctcttgctgctggtggtggccctggggatcggcctcttcatgcgaaggcgccacatcgttcggaagcgcacgctgcggaggctgctgcaggagagggagcttgtggagcctcttacacccagtggagaagctcccaaccaagctctcttgaggatcttgaaggaaactgaattcaaaaagatcaaagtgctgggctccggtgcgttcggcacggtgtataagggactctggatcccagaaggtgagaaagttaaaattcccgtcgctatcaaggaattaagagaagcaacatctccgaaagccaacaaggaaatcctcgatgaagcctacgtgatggccagcgtggacaacccccacgtgtgccgcctgctgggcatctgcctcacctccaccgtgcagctcatcacgcagctcatgcccttcggctgcctcctggactatgtccgggaacacaaagacaatattggctcccagtacctgctcaactggtgtgtgcagatcgcaaagggcatgaactacttggaggaccgtcgcttggtgcaccgcgacctggcagccaggaacgtactggtgaaaacaccgcagcatgtcaagatcacagattttgggctggccaaactgctgggtgcggaagagaaagaataccatgcagaaggaggcaaagtgcctatcaagtggatggcattggaatcaattttacacagaatctatacccaccagagtgatgtctggagctacggggtgactgtttgggagttgatgacctttggatccaagccatatgacggaatccctgccagcgagatctcctccatcctggagaaaggagaacgcctccctcagccacccatatgtaccatcgatgtctacatgatcatggtcaagtgctggatgatagacgcagatagtcgcccaaagttccgtgagttgatcatcgaattctccaaaatggcccgagacccccagcgctaccttgtcattcagggggatgaaagaatgcatttgccaagtcctacagactccaacttctaccgtgccctgatggatgaagaagacatggacgacgtggtggatgccgacgagtacctcatcccacagcagggcttcttcagcagcccctccacgtcacggactcccctcctgagctctctgagtgcaaccagcaacaattccaccgtggcttgcattgatagaaatgggctgcaaagctgtcccatcaaggaagacagcttcttgcagcgatacagctcagaccccacaggcgccttgactgaggacagcatagacgacaccttcctcccagtgcctgaatacataaaccagtccgttcccaaaaggcccgctggctctgtgcagaatcctgtctatcacaatcagcctctgaaccccgcgcccagcagagacccacactaccaggacccccacagcactgcagtgggcaaccccgagtatctcaacactgtccagcccacctgtgtcaacagcacattcgacagccctgcccactgggcccagaaaggcagccaccaaattagcctggacaaccctgactaccagcaggacttctttcccaaggaagccaagccaaatggcatctttaagggctccacagctgaaaatgcagaatacctaagggtcgcgccacaaagcagtgaatttattggagcatgaccacggaggatagtatgagccctaaaaatccagactctttcgatacccaggaccaagccacagcaggtcctccatcccaacagccatgcccgcattagctcttagacccacagactggttttgcaacgtttacaccgactagccaggaagtacttccacctcgggcacattttgggaagttgcattcctttgtcttcaaactgtgaagcatttacagaaacgcatccagcaagaatattgtccctttgagcagaaatttatctttcaaagaggtatatttgaaaaaaaaaaaaagtatatgtgaggatttttattgattggggatcttggagtttttcattgtcgctattgatttttacttcaatgggctcttccaacaaggaagaagcttgctggtagcacttgctaccctgagttcatccaggcccaactgtgagcaaggagcacaagccacaagtcttccagaggatgcttgattccagtggttctgcttcaaggcttccactgcaaaacactaaagatccaagaaggccttcatggccccagcaggccggatcggtactgtatcaagtcatggcaggtacagtaggataagccactctgtcccttcctgggcaaagaagaaacggaggggatggaattcttccttagacttacttttgtaaaaatgtccccacggtacttactccccactgatggaccagtggtttccagtcatgagcgttagactgacttgtttgtcttccattccattgttttgaaactcagtatgctgcccctgtcttgctgtcatgaaatcagcaagagaggatgacacatcaaataataactcggattccagcccacattggattcatcagcatttggaccaatagcccacagctgagaatgtggaatacctaaggatagcaccgcttttgttctcgcaaaaacgtatctcctaatttgaggctcagatgaaatgcatcaggtcctttggggcatagatcagaagactacaaaaatgaagctgctctgaaatctcctttagccatcaccccaaccccccaaaattagtttgtgttacttatggaagatagttttctccttttacttcacttcaaaagctttttactcaaagagtatatgttccctccaggtcagctgcccccaaaccccctccttacgctttgtcacacaaaaagtgtctctgccttgagtcatctattcaagcacttacagctctggccacaacagggcattttacaggtgcgaatgacagtagcattatgagtagtgtggaattcaggtagtaaatatgaaactagggtttgaaattgataatgctttcacaacatttgcagatgttttagaaggaaaaaagttccttcctaaaataatttctctacaattggaagattggaagattcagctagttaggagcccaccttttttcctaatctgtgtgtgccctgtaacctgactggttaacagcagtcctttgtaaacagtgttttaaactctcctagtcaatatccaccccatccaatttatcaaggaagaaatggttcagaaaatattttcagcctacagttatgttcagtcacacacacatacaaaatgttccttttgcttttaaagtaatttttgactcccagatcagtcagagcccctacagcattgttaagaaagtatttgatttttgtctcaatgaaaataaaactatattcatttccactctattatgctctcaaatacccctaagcatctatactagcctggtatgggtatgaaagatacaaagataaataaaacatagtccctgattctaagaaattcacaatttagcaaaggaaatggactcatagatgctaaccttaaaacaacgtgacaaatgccagacaggacccatcagccaggcactgtgagagcacagagcagggaggttgggtcctgcctgaggagacctggaagggaggcctcacaggaggatgaccaggtctcagtcagcggggaggtggaaagtgcaggtgcatcaggggcaccctgaccgaggaaacagctgccagaggcctccactgctaaagtccacataaggctgaggtcagtcaccctaaacaacctgctccctctaagccaggggatgagcttggagcatcccacaagttccctaaaagttgcagcccccagggggattttgagctatcatctctgcacatgcttagtgagaagactacacaacatttctaagaatctgagattttatattgtcagttaaccactttcattattcattcacctcaggacatgcagaaatatttcagtcagaactgggaaacagaaggacctacattctgctgtcacttatgtgtcaagaagcagatgatcgatgaggcaggtcagttgtaagtgagtcacattgtagcattaaattctagtatttttgtagtttgaaacagtaacttaataaaagagcaaaagctattctagctttcttcttcatattttaattttccaccataaagtttagttgctaaattctattaattttaagattgtgcttcccaaaatagttctcacttcatctgtccagggaggcacagttctgtctggtagaagccgcaaagcccttagcctcttcacggatctggcgactgtgatgggcaggtcaggagaggagctgcccaaagtcccatgattttcacctaacagccctgatcagtcagtactcaaagcttggactccatccctgaaggtcttcctgattgatagcctggccttaataccctacagaaagcctgtccattggctgtttcttcctcagtcagttcctggaagaccttaccccatgaccccagcttcagatgtggtctttggaaacagaggtcgaaggaaagtaaggagctgagagctcacattcataggtgccgccagccttcgtgcatcttcttgcatcatctctaaggagctcctctaattacaccatgcccgtcaccccatgagggatcagagaagggatgagtcttctaaactctatattcgctgtgagtccaggttgtaagggggagcactgtggatgcatcctattgcactccagctgatgacaccaaagcttaggtgtttgctgaaagttcttgatgttgtgacttaccacccctgcctcacaactgcagacataaggggactatggattgcttagcaggaaaggcactggttctcaagggcggctgcccttgggaatcttctggtcccaaccagaaagactgtggcttgattttctcaggtgcagcccagccgtagggccttttcagagcaccccctggttattgcaacattcatcaaagtttctagaacctctggcctaaaggaagggcctggtgggatctacttggcactcgctggggggccaccccccagtgccactctcactaggcctctgattgcacttgtgtaggatgaagctggtgggtgatgggaactcagcacctcccctcaggcagaaaagaatcatctgtggagcttcaaaagaaggggcctggagtctctgcagaccaattcaacccaaatctcgggggctctttcatgattctaatgggcaaccagggttgaaacccttatttctagggtcttcagttgtacaagactgtgggtctgtaccagagcccccgtcagagtagaataaaaggctgggtagggtagagattcccatgtgcagtggagagaacaatctgcagtcactgataagcctgagacttggctcatttcaaaagcgttcaattcatcctcaccagcagttcagctggaaaggggcaaatacccccacctgagctttgaaaacgccctgggaccctctgcattctctaagtaagttatagaaaccagtctcttccctcctttgtgagtgagctgctattccacgtaggcaacacctgttgaaattgccctcaatgtctactctgcatttctttcttgtgataagcacacacttttattgcaacataatgatctgctcacatttccttgcctgggggctgtaaaaccttacagaacagaaatccttgcctctttcaccagccacacctgccataccaggggtacagctttgtactattgaagacacagacaggatttttaaatgtaaatctatttttgtaactttgttgcgggatatagttctctttatgtagcactgaactttgtacaatatatttttagaaactcatttttctactaaaacaaacacagtttactttagagagactgcaatagaatcaaaatttgaaactgaaatctttgtttaaaagggttaagttgaggcaagaggaaagccctttctctctcttataaaaaggcacaacctcattggggagctaagctaggtcattgtcatggtgaagaagagaagcatcgtttttatatttaggaaattttaaaagatgatggaaagcacatttagcttggtctgaggcaggttctgttggggcagtgttaatggaaagggctcactgttgttactactagaaaaatccagttgcatgccatactctcatcatctgccagtgtaaccctgtacatgtaagaaaagcaataacatagcactttgttggtttatatatataatgtgacttcaatgcaaattttatttttatatttacaattgatatgcatttaccagtataaactagacatgtctggagagcctaataatgttcagcacactttggttagttcaccaacagtcttaccaagcctgggcccagccaccctagagaagttattcagccctggctgcagtgacatcacctgaggagcttttaaaagcttgaagcccagctacacctcagaccgattaaacgcaaatctctggggctgaaacccaagcattcgtagtttttaaagctcctgaggtcattccaatgtgcggccaaagttgagaactactggcctagggattagccacaaggacatggacttggaggcaaattctgcaggtgtatgtgattctcaggcctagagagctaagacacaaagacctccacatctgtcgctgagagtcaagaacctgaacagagtttccatgaaggttctccaagcactagaagggagagtgtctaaacaatggttgaaaagcaaaggaaatataaaacagacacctctttccatttcctaaggtttctctctttattaagggtggactagtaataaaatataatattcttgctgcttatgcagctgacattgttgccctccctaaagcaaccaagtagcctttatttcccacagtgaaagaaaacgctggcctatcagttacattacaaaaggcagatttcaagaggattgagtaagtagttggatggctttcataaaaacaagaattcaagaagaggattcatgctttaagaaacatttgttatacattcctcacaaattatacctgggataaaaactatgtagcaggcagtgtgttttccttccatgtctctctgcactacctgcagtgtgtcctctgaggctgcaagtctgtcctatctgaattcccagcagaagcactaagaagctccaccctatcacctagcagataaaactatggggaaaacttaaatctgtgcatacatttctggatgcatttacttatctttaaaaaaaaaggaatcctatgacctgatttggccacaaaaataatcttgctgtacaatacaatctcttggaaattaagagatcctatggatttgatgactggtattagaggtgacaatgtaaccgattaacaacagacagcaataacttcgttttagaaacattcaagcaatagctttatagcttcaacatatggtacgttttaaccttgaaagttttgcaatgatgaaagcagtatttgtacaaatgaaaagcagaattctcttttatatggtttatactgttgatcagaaatgttgattgtgcattgagtattaaaaaattagatgtatattattcattgttctttactcctgagtaccttataataataataatgtattctttgttaacaa

SEQ ID NO: 418 - DNA, 9104 bp, Artificial Sequence
  Description of Artificial Sequence: Synthetic polynucleotide
agacgtccgggcagcccccggcgcagcgcggccgcagcagcctccgccccccgcacggtgtgagcgcccgacgcggccgaggcggccggagtcccgagctagccccggcggccgccgccgcccagaccggacgacaggccacctcgtcggcgtccgcccgagtccccgcctcgccgccaacgccacaaccaccgcgcacggccccctgactccgtccagtattgatcgggagagccggagcgagctcttcggggagcagcgatgcgaccctccgggacggccggggcagcgctcctggcgctgctggctgcgctctgcccggcgagtcgggctctggaggaaaagaaaggtaattatgtggtgacagatcacggctcgtgcgtccgagcctgtggggccgacagctatgagatggaggaagacggcgtccgcaagtgtaagaagtgcgaagggccttgccgcaaagtgtgtaacggaataggtattggtgaatttaaagactcactctccataaatgctacgaatattaaacacttcaaaaactgcacctccatcagtggcgatctccacatcctgccggtggcatttaggggtgactccttcacacatactcctcctctggatccacaggaactggatattctgaaaaccgtaaaggaaatcacagggtttttgctgattcaggcttggcctgaaaacaggacggacctccatgcctttgagaacctagaaatcatacgcggcaggaccaagcaacatggtcagttttctcttgcagtcgtcagcctgaacataacatccttgggattacgctccctcaaggagataagtgatggagatgtgataatttcaggaaacaaaaatttgtgctatgcaaatacaataaactggaaaaaactgtttgggacctccggtcagaaaaccaaaattataagcaacagaggtgaaaacagctgcaaggccacaggccaggtctgccatgccttgtgctcccccgagggctgctggggcccggagcccagggactgcgtctcttgccggaatgtcagccgaggcagggaatgcgtggacaagtgcaaccttctggagggtgagccaagggagtttgtggagaactctgagtgcatacagtgccacccagagtgcctgcctcaggccatgaacatcacctgcacaggacggggaccagacaactgtatccagtgtgcccactacattgacggcccccactgcgtcaagacctgcccggcaggagtcatgggagaaaacaacaccctggtctggaagtacgcagacgccggccatgtgtgccacctgtgccatccaaactgcacctacggatgcactgggccaggtcttgaaggctgtccaacgaatgggcctaagatcccgtccatcgccactgggatggtgggggccctcctcttgctgctggtggtggccctggggatcggcctcttcatgcgaaggcgccacatcgttcggaagcgcacgctgcggaggctgctgcaggagagggagcttgtggagcctcttacacccagtggagaagctcccaaccaagctctcttgaggatcttgaaggaaactgaattcaaaaagatcaaagtgctgggctccggtgcgttcggcacggtgtataagggactctggatcccagaaggtgagaaagttaaaattcccgtcgctatcaaggaattaagagaagcaacatctccgaaagccaacaaggaaatcctcgatgaagcctacgtgatggccagcgtggacaacccccacgtgtgccgcctgctgggcatctgcctcacctccaccgtgcagctcatcacgcagctcatgcccttcggctgcctcctggactatgtccgggaacacaaagacaatattggctcccagtacctgctcaactggtgtgtgcagatcgcaaagggcatgaactacttggaggaccgtcgcttggtgcaccgcgacctggcagccaggaacgtactggtgaaaacaccgcagcatgtcaagatcacagattttgggctggccaaactgctgggtgcggaagagaaagaataccatgcagaaggaggcaaagtgcctatcaagtggatggcattggaatcaattttacacagaatctatacccaccagagtgatgtctggagctacggggtgactgtttgggagttgatgacctttggatccaagccatatgacggaatccctgccagcgagatctcctccatcctggagaaaggagaacgcctccctcagccacccatatgtaccatcgatgtctacatgatcatggtcaagtgctggatgatagacgcagatagtcgcccaaagttccgtgagttgatcatcgaattctccaaaatggcccgagacccccagcgctaccttgtcattcagggggatgaaagaatgcatttgccaagtcctacagactccaacttctaccgtgccctgatggatgaagaagacatggacgacgtggtggatgccgacgagtacctcatcccacagcagggcttcttcagcagcccctccacgtcacggactcccctcctgagctctctgagtgcaaccagcaacaattccaccgtggcttgcattgatagaaatgggctgcaaagctgtcccatcaaggaagacagcttcttgcagcgatacagctcagaccccacaggcgccttgactgaggacagcatagacgacaccttcctcccagtgcctgaatacataaaccagtccgttcccaaaaggcccgctggctctgtgcagaatcctgtctatcacaatcagcctctgaaccccgcgcccagcagagacccacactaccaggacccccacagcactgcagtgggcaaccccgagtatctcaacactgtccagcccacctgtgtcaacagcacattcgacagccctgcccactgggcccagaaaggcagccaccaaattagcctggacaaccctgactaccagcaggacttctttcccaaggaagccaagccaaatggcatctttaagggctccacagctgaaaatgcagaatacctaagggtcgcgccacaaagcagtgaatttattggagcatgaccacggaggatagtatgagccctaaaaatccagactctttcgatacccaggaccaagccacagcaggtcctccatcccaacagccatgcccgcattagctcttagacccacagactggttttgcaacgtttacaccgactagccaggaagtacttccacctcgggcacattttgggaagttgcattcctttgtcttcaaactgtgaagcatttacagaaacgcatccagcaagaatattgtccctttgagcagaaatttatctttcaaagaggtatatttgaaaaaaaaaaaaagtatatgtgaggatttttattgattggggatcttggagtttttcattgtcgctattgatttttacttcaatgggctcttccaacaaggaagaagcttgctggtagcacttgctaccctgagttcatccaggcccaactgtgagcaaggagcacaagccacaagtcttccagaggatgcttgattccagtggttctgcttcaaggcttccactgcaaaacactaaagatccaagaaggccttcatggccccagcaggccggatcggtactgtatcaagtcatggcaggtacagtaggataagccactctgtcccttcctgggcaaagaagaaacggaggggatggaattcttccttagacttacttttgtaaaaatgtccccacggtacttactccccactgatggaccagtggtttccagtcatgagcgttagactgacttgtttgtcttccattccattgttttgaaactcagtatgctgcccctgtcttgctgtcatgaaatcagcaagagaggatgacacatcaaataataactcggattccagcccacattggattcatcagcatttggaccaatagcccacagctgagaatgtggaatacctaaggatagcaccgcttttgttctcgcaaaaacgtatctcctaatttgaggctcagatgaaatgcatcaggtcctttggggcatagatcagaagactacaaaaatgaagctgctctgaaatctcctttagccatcaccccaaccccccaaaattagtttgtgttacttatggaagatagttttctccttttacttcacttcaaaagctttttactcaaagagtatatgttccctccaggtcagctgcccccaaaccccctccttacgctttgtcacacaaaaagtgtctctgccttgagtcatctattcaagcacttacagctctggccacaacagggcattttacaggtgcgaatgacagtagcattatgagtagtgtggaattcaggtagtaaatatgaaactagggtttgaaattgataatgctttcacaacatttgcagatgttttagaaggaaaaaagttccttcctaaaataatttctctacaattggaagattggaagattcagctagttaggagcccaccttttttcctaatctgtgtgtgccctgtaacctgactggttaacagcagtcctttgtaaacagtgttttaaactctcctagtcaatatccaccccatccaatttatcaaggaagaaatggttcagaaaatattttcagcctacagttatgttcagtcacacacacatacaaaatgttccttttgcttttaaagtaatttttgactcccagatcagtcagagcccctacagcattgttaagaaagtatttgatttttgtctcaatgaaaataaaactatattcatttccactctattatgctctcaaatacccctaagcatctatactagcctggtatgggtatgaaagatacaaagataaataaaacatagtccctgattctaagaaattcacaatttagcaaaggaaatggactcatagatgctaaccttaaaacaacgtgacaaatgccagacaggacccatcagccaggcactgtgagagcacagagcagggaggttgggtcctgcctgaggagacctggaagggaggcctcacaggaggatgaccaggtctcagtcagcggggaggtggaaagtgcaggtgcatcaggggcaccctgaccgaggaaacagctgccagaggcctccactgctaaagtccacataaggctgaggtcagtcaccctaaacaacctgctccctctaagccaggggatgagcttggagcatcccacaagttccctaaaagttgcagcccccagggggattttgagctatcatctctgcacatgcttagtgagaagactacacaacatttctaagaatctgagattttatattgtcagttaaccactttcattattcattcacctcaggacatgcagaaatatttcagtcagaactgggaaacagaaggacctacattctgctgtcacttatgtgtcaagaagcagatgatcgatgaggcaggtcagttgtaagtgagtcacattgtagcattaaattctagtatttttgtagtttgaaacagtaacttaataaaagagcaaaagctattctagctttcttcttcatattttaattttccaccataaagtttagttgctaaattctattaattttaagattgtgcttcccaaaatagttctcacttcatctgtccagggaggcacagttctgtctggtagaagccgcaaagcccttagcctcttcacggatctggcgactgtgatgggcaggtcaggagaggagctgcccaaagtcccatgattttcacctaacagccctgatcagtcagtactcaaagcttggactccatccctgaaggtcttcctgattgatagcctggccttaataccctacagaaagcctgtccattggctgtttcttcctcagtcagttcctggaagaccttaccccatgaccccagcttcagatgtggtctttggaaacagaggtcgaaggaaagtaaggagctgagagctcacattcataggtgccgccagccttcgtgcatcttcttgcatcatctctaaggagctcctctaattacaccatgcccgtcaccccatgagggatcagagaagggatgagtcttctaaactctatattcgctgtgagtccaggttgtaagggggagcactgtggatgcatcctattgcactccagctgatgacaccaaagcttaggtgtttgctgaaagttcttgatgttgtgacttaccacccctgcctcacaactgcagacataaggggactatggattgcttagcaggaaaggcactggttctcaagggcggctgcccttgggaatcttctggtcccaaccagaaagactgtggcttgattttctcaggtgcagcccagccgtagggccttttcagagcaccccctggttattgcaacattcatcaaagtttctagaacctctggcctaaaggaagggcctggtgggatctacttggcactcgctggggggccaccccccagtgccactctcactaggcctctgattgcacttgtgtaggatgaagctggtgggtgatgggaactcagcacctcccctcaggcagaaaagaatcatctgtggagcttcaaaagaaggggcctggagtctctgcagaccaattcaacccaaatctcgggggctctttcatgattctaatgggcaaccagggttgaaacccttatttctagggtcttcagttgtacaagactgtgggtctgtaccagagcccccgtcagagtagaataaaaggctgggtagggtagagattcccatgtgcagtggagagaacaatctgcagtcactgataagcctgagacttggctcatttcaaaagcgttcaattcatcctcaccagcagttcagctggaaaggggcaaatacccccacctgagctttgaaaacgccctgggaccctctgcattctctaagtaagttatagaaaccagtctcttccctcctttgtgagtgagctgctattccacgtaggcaacacctgttgaaattgccctcaatgtctactctgcatttctttcttgtgataagcacacacttttattgcaacataatgatctgctcacatttccttgcctgggggctgtaaaaccttacagaacagaaatccttgcctctttcaccagccacacctgccataccaggggtacagctttgtactattgaagacacagacaggatttttaaatgtaaatctatttttgtaactttgttgcgggatatagttctctttatgtagcactgaactttgtacaatatatttttagaaactcatttttctactaaaacaaacacagtttactttagagagactgcaatagaatcaaaatttgaaactgaaatctttgtttaaaagggttaagttgaggcaagaggaaagccctttctctctcttataaaaaggcacaacctcattggggagctaagctaggtcattgtcatggtgaagaagagaagcatcgtttttatatttaggaaattttaaaagatgatggaaagcacatttagcttggtctgaggcaggttctgttggggcagtgttaatggaaagggctcactgttgttactactagaaaaatccagttgcatgccatactctcatcatctgccagtgtaaccctgtacatgtaagaaaagcaataacatagcactttgttggtttatatatataatgtgacttcaatgcaaattttatttttatatttacaattgatatgcatttaccagtataaactagacatgtctggagagcctaataatgttcagcacactttggttagttcaccaacagtcttaccaagcctgggcccagccaccctagagaagttattcagccctggctgcagtgacatcacctgaggagcttttaaaagcttgaagcccagctacacctcagaccgattaaacgcaaatctctggggctgaaacccaagcattcgtagtttttaaagctcctgaggtcattccaatgtgcggccaaagttgagaactactggcctagggattagccacaaggacatggacttggaggcaaattctgcaggtgtatgtgattctcaggcctagagagctaagacacaaagacctccacatctgtcgctgagagtcaagaacctgaacagagtttccatgaaggttctccaagcactagaagggagagtgtctaaacaatggttgaaaagcaaaggaaatataaaacagacacctctttccatttcctaaggtttctctctttattaagggtggactagtaataaaatataatattcttgctgcttatgcagctgacattgttgccctccctaaagcaaccaagtagcctttatttcccacagtgaaagaaaacgctggcctatcagttacattacaaaaggcagatttcaagaggattgagtaagtagttggatggctttcataaaaacaagaattcaagaagaggattcatgctttaagaaacatttgttatacattcctcacaaattatacctgggataaaaactatgtagcaggcagtgtgttttccttccatgtctctctgcactacctgcagtgtgtcctctgaggctgcaagtctgtcctatctgaattcccagcagaagcactaagaagctccaccctatcacctagcagataaaactatggggaaaacttaaatctgtgcatacatttctggatgcatttacttatctttaaaaaaaaaggaatcctatgacctgatttggccacaaaaataatcttgctgtacaatacaatctcttggaaattaagagatcctatggatttgatgactggtattagaggtgacaatgtaaccgattaacaacagacagcaataacttcgttttagaaacattcaagcaatagctttatagcttcaacatatggtacgttttaaccttgaaagttttgcaatgatgaaagcagtatttgtacaaatgaaaagcagaattctcttttatatggtttatactgttgatcagaaatgttgattgtgcattgagtattaaaaaattagatgtatattattcattgttctttactcctgagtaccttataataataataatgtattctttgttaacaa

SEQ ID NO: 419 - DNA, 3983 bp, Artificial Sequence
  Description of Artificial Sequence: Synthetic polynucleotide
agacgtccgggcagcccccggcgcagcgcggccgcagcagcctccgccccccgcacggtgtgagcgcccgacgcggccgaggcggccggagtcccgagctagccccggcggccgccgccgcccagaccggacgacaggccacctcgtcggcgtccgcccgagtccccgcctcgccgccaacgccacaaccaccgcgcacggccccctgactccgtccagtattgatcgggagagccggagcgagctcttcggggagcagcgatgcgaccctccgggacggccggggcagcgctcctggcgctgctggctgcgctctgcccggcgagtcgggctctggaggaaaagaaagtttgccaaggcacgagtaacaagctcacgcagttgggcacttttgaagatcattttctcagcctccagaggatgttcaataactgtgaggtggtccttgggaatttggaaattacctatgtgcagaggaattatgatctttccttcttaaagaccatccaggaggtggctggttatgtcctcattgccctcaacacagtggagcgaattcctttggaaaacctgcagatcatcagaggaaatatgtactacgaaaattcctatgccttagcagtcttatctaactatgatgcaaataaaaccggactgaaggagctgcccatgagaaatttacaggaaatcctgcatggcgccgtgcggttcagcaacaaccctgccctgtgcaacgtggagagcatccagtggcgggacatagtcagcagtgactttctcagcaacatgtcgatggacttccagaaccacctgggcagctgccaaaagtgtgatccaagctgtcccaatgggagctgctggggtgcaggagaggagaactgccagaaactgaccaaaatcatctgtgcccagcagtgctccgggcgctgccgtggcaagtcccccagtgactgctgccacaaccagtgtgctgcaggctgcacaggcccccgggagagcgactgcctggtctgccgcaaattccgagacgaagccacgtgcaaggacacctgccccccactcatgctctacaaccccaccacgtaccagatggatgtgaaccccgagggcaaatacagctttggtgccacctgcgtgaagaagtgtccccgtaattatgtggtgacagatcacggctcgtgcgtccgagcctgtggggccgacagctatgagatggaggaagacggcgtccgcaagtgtaagaagtgcgaagggccttgccgcaaagtgtgtaacggaataggtattggtgaatttaaagactcactctccataaatgctacgaatattaaacacttcaaaaactgcacctccatcagtggcgatctccacatcctgccggtggcatttaggggtgactccttcacacatactcctcctctggatccacaggaactggatattctgaaaaccgtaaaggaaatcacagggtttttgctgattcaggcttggcctgaaaacaggacggacctccatgcctttgagaacctagaaatcatacgcggcaggaccaagcaacatggtcagttttctcttgcagtcgtcagcctgaacataacatccttgggattacgctccctcaaggagataagtgatggagatgtgataatttcaggaaacaaaaatttgtgctatgcaaatacaataaactggaaaaaactgtttgggacctccggtcagaaaaccaaaattataagcaacagaggtgaaaacagctgcaaggccacaggccaggtctgccatgccttgtgctcccccgagggctgctggggcccggagcccagggactgcgtctcttgccggaatgtcagccgaggcagggaatgcgtggacaagtgcaaccttctggagggtgagccaagggagtttgtggagaactctgagtgcatacagtgccacccagagtgcctgcctcaggccatgaacatcacctgcacaggacggggaccagacaactgtatccagtgtgcccactacattgacggcccccactgcgtcaagacctgcccggcaggagtcatgggagaaaacaacaccctggtctggaagtacgcagacgccggccatgtgtgccacctgtgccatccaaactgcacctacggatgcactgggccaggtcttgaaggctgtccaacgaatgggcctaagatcccgtccatcgccactgggatggtgggggccctcctcttgctgctggtggtggccctggggatcggcctcttcatgcgaaggcgccacatcgttcggaagcgcacgctgcggaggctgctgcaggagagggagcttgtggagcctcttacacccagtggagaagctcccaaccaagctctcttgaggatcttgaaggaaactgaattcaaaaagatcaaagtgctgggctccggtgcgttcggcacggtgtataagggactctggatcccagaaggtgagaaagttaaaattcccgtcgctatcaaggaattaagagaagcaacatctccgaaagccaacaaggaaatcctcgatgaagcctacgtgatggccagcgtggacaacccccacgtgtgccgcctgctgggcatctgcctcacctccaccgtgcagctcatcacgcagctcatgcccttcggctgcctcctggactatgtccgggaacacaaagacaatattggctcccagtacctgctcaactggtgtgtgcagatcgcaaagggcatgaactacttggaggaccgtcgcttggtgcaccgcgacctggcagccaggaacgtactggtgaaaacaccgcagcatgtcaagatcacagattttgggctggccaaactgctgggtgcggaagagaaagaataccatgcagaaggaggcaaagtgcctatcaagtggatggcattggaatcaattttacacagaatctatacccaccagagtgatgtctggagctacggggtgactgtttgggagttgatgacctttggatccaagccatatgacggaatccctgccagcgagatctcctccatcctggagaaaggagaacgcctccctcagccacccatatgtaccatcgatgtctacatgatcatggtcaagtgctggatgatagacgcagatagtcgcccaaagttccgtgagttgatcatcgaattctccaaaatggcccgagacccccagcgctaccttgtcattcagggggatgaaagaatgcatttgccaagtcctacagactccaacttctaccgtgccctgatggatgaagaagacatggacgacgtggtggatgccgacgagtacctcatcccacagcagggcttcttcagcagcccctccacgtcacggactcccctcctgagctctctgagtgcaaccagcaacaattccaccgtggcttgcattgatagaaatgggctgcaaagctgtcccatcaaggaagacagcttcttgcagcgatacagctcagaccccacaggcgccttgactgaggacagcatagacgacaccttcctcccagtgcctggtgagtggcttgtctggaaacagtcctgctcctcaacctcctcgacccactcagcagcagccagtctccagtgtccaagccaggtgctccctccagcatctccagagggggaaacagtggcagatttgcagacacagtgaagggcgtaaggagcagataaacacatgaccgagcctgcacaagctctttgttgtgtctggttgtttgctgtacctctgttgtaagaatgaatctgcaaaatttctagcttatgaagcaaatcacggacatacacatctgtgtgtgtgagtgttcatgatgtgtgtacatctgtgtatgtgtgtgtgtgtatgtgtgtgtttgtgacagatttgatccctgttctctctgctggctctatcttgacctgtgaaacgtatatttaactaattaaatattagttaatattaataaattttaagctttatccaga

SEQ ID NO: 420 - DNA, 3848 bp, Artificial Sequence
  Description of Artificial Sequence: Synthetic polynucleotide
agacgtccgggcagcccccggcgcagcgcggccgcagcagcctccgccccccgcacggtgtgagcgcccgacgcggccgaggcggccggagtcccgagctagccccggcggccgccgccgcccagaccggacgacaggccacctcgtcggcgtccgcccgagtccccgcctcgccgccaacgccacaaccaccgcgcacggccccctgactccgtccagtattgatcgggagagccggagcgagctcttcggggagcagcgatgcgaccctccgggacggccggggcagcgctcctggcgctgctggctgcgctctgcccggcgagtcgggctctggaggaaaagaaagtttgccaaggcacgagtaacaagctcacgcagttgggcacttttgaagatcattttctcagcctccagaggatgttcaataactgtgaggtggtccttgggaatttggaaattacctatgtgcagaggaattatgatctttccttcttaaagaccatccaggaggtggctggttatgtcctcattgccctcaacacagtggagcgaattcctttggaaaacctgcagatcatcagaggaaatatgtactacgaaaattcctatgccttagcagtcttatctaactatgatgcaaataaaaccggactgaaggagctgcccatgagaaatttacagggccaaaagtgtgatccaagctgtcccaatgggagctgctggggtgcaggagaggagaactgccagaaactgaccaaaatcatctgtgcccagcagtgctccgggcgctgccgtggcaagtcccccagtgactgctgccacaaccagtgtgctgcaggctgcacaggcccccgggagagcgactgcctggtctgccgcaaattccgagacgaagccacgtgcaaggacacctgccccccactcatgctctacaaccccaccacgtaccagatggatgtgaaccccgagggcaaatacagctttggtgccacctgcgtgaagaagtgtccccgtaattatgtggtgacagatcacggctcgtgcgtccgagcctgtggggccgacagctatgagatggaggaagacggcgtccgcaagtgtaagaagtgcgaagggccttgccgcaaagtgtgtaacggaataggtattggtgaatttaaagactcactctccataaatgctacgaatattaaacacttcaaaaactgcacctccatcagtggcgatctccacatcctgccggtggcatttaggggtgactccttcacacatactcctcctctggatccacaggaactggatattctgaaaaccgtaaaggaaatcacagggtttttgctgattcaggcttggcctgaaaacaggacggacctccatgcctttgagaacctagaaatcatacgcggcaggaccaagcaacatggtcagttttctcttgcagtcgtcagcctgaacataacatccttgggattacgctccctcaaggagataagtgatggagatgtgataatttcaggaaacaaaaatttgtgctatgcaaatacaataaactggaaaaaactgtttgggacctccggtcagaaaaccaaaattataagcaacagaggtgaaaacagctgcaaggccacaggccaggtctgccatgccttgtgctcccccgagggctgctggggcccggagcccagggactgcgtctcttgccggaatgtcagccgaggcagggaatgcgtggacaagtgcaaccttctggagggtgagccaagggagtttgtggagaactctgagtgcatacagtgccacccagagtgcctgcctcaggccatgaacatcacctgcacaggacggggaccagacaactgtatccagtgtgcccactacattgacggcccccactgcgtcaagacctgcccggcaggagtcatgggagaaaacaacaccctggtctggaagtacgcagacgccggccatgtgtgccacctgtgccatccaaactgcacctacggatgcactgggccaggtcttgaaggctgtccaacgaatgggcctaagatcccgtccatcgccactgggatggtgggggccctcctcttgctgctggtggtggccctggggatcggcctcttcatgcgaaggcgccacatcgttcggaagcgcacgctgcggaggctgctgcaggagagggagcttgtggagcctcttacacccagtggagaagctcccaaccaagctctcttgaggatcttgaaggaaactgaattcaaaaagatcaaagtgctgggctccggtgcgttcggcacggtgtataagggactctggatcccagaaggtgagaaagttaaaattcccgtcgctatcaaggaattaagagaagcaacatctccgaaagccaacaaggaaatcctcgatgaagcctacgtgatggccagcgtggacaacccccacgtgtgccgcctgctgggcatctgcctcacctccaccgtgcagctcatcacgcagctcatgcccttcggctgcctcctggactatgtccgggaacacaaagacaatattggctcccagtacctgctcaactggtgtgtgcagatcgcaaagggcatgaactacttggaggaccgtcgcttggtgcaccgcgacctggcagccaggaacgtactggtgaaaacaccgcagcatgtcaagatcacagattttgggctggccaaactgctgggtgcggaagagaaagaataccatgcagaaggaggcaaagtgcctatcaagtggatggcattggaatcaattttacacagaatctatacccaccagagtgatgtctggagctacggggtgactgtttgggagttgatgacctttggatccaagccatatgacggaatccctgccagcgagatctcctccatcctggagaaaggagaacgcctccctcagccacccatatgtaccatcgatgtctacatgatcatggtcaagtgctggatgatagacgcagatagtcgcccaaagttccgtgagttgatcatcgaattctccaaaatggcccgagacccccagcgctaccttgtcattcagggggatgaaagaatgcatttgccaagtcctacagactccaacttctaccgtgccctgatggatgaagaagacatggacgacgtggtggatgccgacgagtacctcatcccacagcagggcttcttcagcagcccctccacgtcacggactcccctcctgagctctctgagtgcaaccagcaacaattccaccgtggcttgcattgatagaaatgggctgcaaagctgtcccatcaaggaagacagcttcttgcagcgatacagctcagaccccacaggcgccttgactgaggacagcatagacgacaccttcctcccagtgcctggtgagtggcttgtctggaaacagtcctgctcctcaacctcctcgacccactcagcagcagccagtctccagtgtccaagccaggtgctccctccagcatctccagagggggaaacagtggcagatttgcagacacagtgaagggcgtaaggagcagataaacacatgaccgagcctgcacaagctctttgttgtgtctggttgtttgctgtacctctgttgtaagaatgaatctgcaaaatttctagcttatgaagcaaatcacggacatacacatctgtgtgtgtgagtgttcatgatgtgtgtacatctgtgtatgtgtgtgtgtgtatgtgtgtgtttgtgacagatttgatccctgttctctctgctggctctatcttgacctgtgaaacgtatatttaactaattaaatattagttaatattaataaattttaagctttatccaga

SEQ ID NO: 421 - DNA, 2872 bp, Artificial Sequence
  Description of Artificial Sequence: Synthetic polynucleotide
agacgtccgggcagcccccggcgcagcgcggccgcagcagcctccgccccccgcacggtgtgagcgcccgacgcggccgaggcggccggagtcccgagctagccccggcggccgccgccgcccagaccggacgacaggccacctcgtcggcgtccgcccgagtccccgcctcgccgccaacgccacaaccaccgcgcacggccccctgactccgtccagtattgatcgggagagccggagcgagctcttcggggagcagcgatgcgaccctccgggacggccggggcagcgctcctggcgctgctggctgcgctctgcccggcgagtcgggctctggaggaaaagaaagtttgccaaggcacgagtaacaagctcacgcagttgggcacttttgaagatcattttctcagcctccagaggatgttcaataactgtgaggtggtccttgggaatttggaaattacctatgtgcagaggaattatgatctttccttcttaaagaccatccaggaggtggctggttatgtcctcattgccctcaacacagtggagcgaattcctttggaaaacctgcagatcatcagaggaaatatgtactacgaaaattcctatgccttagcagtcttatctaactatgatgcaaataaaaccggactgaaggagctgcccatgagaaatttacaggaaatcctgcatggcgccgtgcggttcagcaacaaccctgccctgtgcaacgtggagagcatccagtggcgggacatagtcagcagtgactttctcagcaacatgtcgatggacttccagaaccacctgggcagctgccaaaagtgtgatccaagctgtcccaatgggagctgctggggtgcaggagaggagaactgccagaaactgaccaaaatcatctgtgcccagcagtgctccgggcgctgccgtggcaagtcccccagtgactgctgccacaaccagtgtgctgcaggctgcacaggcccccgggagagcgactgcctggtctgccgcaaattccgagacgaagccacgtgcaaggacacctgccccccactcatgctctacaaccccaccacgtaccagatggatgtgaaccccgagggcaaatacagctttggtgccacctgcgtgaagaagtgtccccgtaattatgtggtgacagatcacggctcgtgcgtccgagcctgtggggccgacagctatgagatggaggaagacggcgtccgcaagtgtaagaagtgcgaagggccttgccgcaaagtgtgtaacggaataggtattggtgaatttaaagactcactctccataaatgctacgaatattaaacacttcaaaaactgcacctccatcagtggcgatctccacatcctgccggtggcatttaggggtgactccttcacacatactcctcctctggatccacaggaactggatattctgaaaaccgtaaaggaaatcacagggtttttgctgattcaggcttggcctgaaaacaggacggacctccatgcctttgagaacctagaaatcatacgcggcaggaccaagcaacatggtcagttttctcttgcagtcgtcagcctgaacataacatccttgggattacgctccctcaaggagataagtgatggagatgtgataatttcaggaaacaaaaatttgtgctatgcaaatacaataaactggaaaaaactgtttgggacctccggtcagaaaaccaaaattataagcaacagaggtgaaaacagctgcaaggccacaggccaggtctgccatgccttgtgctcccccgagggctgctggggcccggagcccagggactgcgtctcttgccggaatgtcagccgaggcagggaatgcgtggacaagtgcaaccttctggagggtgagccaagggagtttgtggagaactctgagtgcatacagtgccacccagagtgcctgcctcaggccatgaacatcacctgcacaggacggggaccagacaactgtatccagtgtgcccactacattgacggcccccactgcgtcaagacctgcccggcaggagtcatgggagaaaacaacaccctggtctggaagtacgcagacgccggccatgtgtgccacctgtgccatccaaactgcacctacgggccaggaaatgagagtctcaaagccatgttattctgcctttttaaactatcatcctgtaatcaaagtaatgatggcagcgtgtcccaccagagcgggagcccagctgctcaggagtcatgcttaggatggatcccttctcttctgccgtcagagtttcagctgggttggggtggatgcagccacctccatgcctggccttctgcatctgtgatcatcacggcctcctcctgccactgagcctcatgccttcacgtgtctgttccccccgcttttcctttctgccacccctgcacgtgggccgccaggttcccaagagtatcctacccatttccttccttccactccctttgccagtgcctctcaccccaactagtagctaaccatcacccccaggactgacctcttcctcctcgctgccagatgattgttcaaagcacagaatttgtcagaaacctgcagggactccatgctgccagccttctccgtaattagcatggccccagtccatgcttctagccttggttccttctgcccctctgtttgaaattctagagccagctgtgggacaattatctgtgtcaaaagccagatgtgaaaacatctcaataacaaactggctgctttgttcaatgctagaacaacgcctgtcacagagtagaaactcaaaaatatttgctgagtgaatgaacaaatgaataaatgcataataaataattaaccaccaatccaa

SEQ ID NO: 422 - DNA, 2254 bp, Artificial Sequence
  Description of Artificial Sequence: Synthetic polynucleotide
agacgtccgggcagcccccggcgcagcgcggccgcagcagcctccgccccccgcacggtgtgagcgcccgacgcggccgaggcggccggagtcccgagctagccccggcggccgccgccgcccagaccggacgacaggccacctcgtcggcgtccgcccgagtccccgcctcgccgccaacgccacaaccaccgcgcacggccccctgactccgtccagtattgatcgggagagccggagcgagctcttcggggagcagcgatgcgaccctccgggacggccggggcagcgctcctggcgctgctggctgcgctctgcccggcgagtcgggctctggaggaaaagaaagtttgccaaggcacgagtaacaagctcacgcagttgggcacttttgaagatcattttctcagcctccagaggatgttcaataactgtgaggtggtccttgggaatttggaaattacctatgtgcagaggaattatgatctttccttcttaaagaccatccaggaggtggctggttatgtcctcattgccctcaacacagtggagcgaattcctttggaaaacctgcagatcatcagaggaaatatgtactacgaaaattcctatgccttagcagtcttatctaactatgatgcaaataaaaccggactgaaggagctgcccatgagaaatttacaggaaatcctgcatggcgccgtgcggttcagcaacaaccctgccctgtgcaacgtggagagcatccagtggcgggacatagtcagcagtgactttctcagcaacatgtcgatggacttccagaaccacctgggcagctgccaaaagtgtgatccaagctgtcccaatgggagctgctggggtgcaggagaggagaactgccagaaactgaccaaaatcatctgtgcccagcagtgctccgggcgctgccgtggcaagtcccccagtgactgctgccacaaccagtgtgctgcaggctgcacaggcccccgggagagcgactgcctggtctgccgcaaattccgagacgaagccacgtgcaaggacacctgccccccactcatgctctacaaccccaccacgtaccagatggatgtgaaccccgagggcaaatacagctttggtgccacctgcgtgaagaagtgtccccgtaattatgtggtgacagatcacggctcgtgcgtccgagcctgtggggccgacagctatgagatggaggaagacggcgtccgcaagtgtaagaagtgcgaagggccttgccgcaaagtgtgtaacggaataggtattggtgaatttaaagactcactctccataaatgctacgaatattaaacacttcaaaaactgcacctccatcagtggcgatctccacatcctgccggtggcatttaggggtgactccttcacacatactcctcctctggatccacaggaactggatattctgaaaaccgtaaaggaaatcacagggtttttgctgattcaggcttggcctgaaaacaggacggacctccatgcctttgagaacctagaaatcatacgcggcaggaccaagcaacatggtcagttttctcttgcagtcgtcagcctgaacataacatccttgggattacgctccctcaaggagataagtgatggagatgtgataatttcaggaaacaaaaatttgtgctatgcaaatacaataaactggaaaaaactgtttgggacctccggtcagaaaaccaaaattataagcaacagaggtgaaaacagctgcaaggccacaggccaggtctgccatgccttgtgctcccccgagggctgctggggcccggagcccagggactgcgtctcttgccggaatgtcagccgaggcagggaatgcgtggacaagtgcaaccttctggagggtgagccaagggagtttgtggagaactctgagtgcatacagtgccacccagagtgcctgcctcaggccatgaacatcacctgcacaggacggggaccagacaactgtatccagtgtgcccactacattgacggcccccactgcgtcaagacctgcccggcaggagtcatgggagaaaacaacaccctggtctggaagtacgcagacgccggccatgtgtgccacctgtgccatccaaactgcacctacgggtcctaataaatcttcactgtctgactttagtctcccactaaaactgcatttcctttctacaatttcaatttctccctttgcttcaaataaagtcctgacactattcatttga

SEQ ID NO: 423 - DNA, 1575 bp, Artificial Sequence
  Description of Artificial Sequence: Synthetic polynucleotide
agacgtccgggcagcccccggcgcagcgcggccgcagcagcctccgccccccgcacggtgtgagcgcccgacgcggccgaggcggccggagtcccgagctagccccggcggccgccgccgcccagaccggacgacaggccacctcgtcggcgtccgcccgagtccccgcctcgccgccaacgccacaaccaccgcgcacggccccctgactccgtccagtattgatcgggagagccggagcgagctcttcggggagcagcgatgcgaccctccgggacggccggggcagcgctcctggcgctgctggctgcgctctgcccggcgagtcgggctctggaggaaaagaaagtttgccaaggcacgagtaacaagctcacgcagttgggcacttttgaagatcattttctcagcctccagaggatgttcaataactgtgaggtggtccttgggaatttggaaattacctatgtgcagaggaattatgatctttccttcttaaagaccatccaggaggtggctggttatgtcctcattgccctcaacacagtggagcgaattcctttggaaaacctgcagatcatcagaggaaatatgtactacgaaaattcctatgccttagcagtcttatctaactatgatgcaaataaaaccggactgaaggagctgcccatgagaaatttacaggaaatcctgcatggcgccgtgcggttcagcaacaaccctgccctgtgcaacgtggagagcatccagtggcgggacatagtcagcagtgactttctcagcaacatgtcgatggacttccagaaccacctgggcagctgccaaaagtgtgatccaagctgtcccaatgggagctgctggggtgcaggagaggagaactgccagaaactgaccaaaatcatctgtgcccagcagtgctccgggcgctgccgtggcaagtcccccagtgactgctgccacaaccagtgtgctgcaggctgcacaggcccccgggagagcgactgcctggtctgccgcaaattccgagacgaagccacgtgcaaggacacctgccccccactcatgctctacaaccccaccacgtaccagatggatgtgaaccccgagggcaaatacagctttggtgccacctgcgtgaagaagtgtccccgtaattatgtggtgacagatcacggctcgtgcgtccgagcctgtggggccgacagctatgagatggaggaagacggcgtccgcaagtgtaagaagtgcgaagggccttgccgcaaagtgtgtaacggaataggtattggtgaatttaaagactcactctccataaatgctacgaatattaaacacttcaaaaactgcacctccatcagtggcgatctccacatcctgccggtggcatttaggggtgactccttcacacatactcctcctctggatccacaggaactggatattctgaaaaccgtaaaggaaatcacaggtttgagctgaattatcacatgaatataaatgggaaatcagtgttttagagagagaacttttcgacatatttcctgttcccttggaataaaaacatttcttctgaaa

SEQ ID NO: 424 - DNA, 9676 bp, Artificial Sequence
  Description of Artificial Sequence: Synthetic polynucleotide
agttctccactggacttcagaacaagagggagctctgggctgctggctggttgtgcatttgctgtgggttccctccggcaggcgacctctccgcgctgagaaggttatccggataaccaatttgccaaggcacgagtaacaagctcacgcagttgggcacttttgaagatcattttctcagcctccagaggatgttcaataactgtgaggtggtccttgggaatttggaaattacctatgtgcagaggaattatgatctttccttcttaaagaccatccaggaggtggctggttatgtcctcattgccctcaacacagtggagcgaattcctttggaaaacctgcagatcatcagaggaaatatgtactacgaaaattcctatgccttagcagtcttatctaactatgatgcaaataaaaccggactgaaggagctgcccatgagaaatttacaggaaatcctgcatggcgccgtgcggttcagcaacaaccctgccctgtgcaacgtggagagcatccagtggcgggacatagtcagcagtgactttctcagcaacatgtcgatggacttccagaaccacctgggcagctgccaaaagtgtgatccaagctgtcccaatgggagctgctggggtgcaggagaggagaactgccagaaactgaccaaaatcatctgtgcccagcagtgctccgggcgctgccgtggcaagtcccccagtgactgctgccacaaccagtgtgctgcaggctgcacaggcccccgggagagcgactgcctggtctgccgcaaattccgagacgaagccacgtgcaaggacacctgccccccactcatgctctacaaccccaccacgtaccagatggatgtgaaccccgagggcaaatacagctttggtgccacctgcgtgaagaagtgtccccgtaattatgtggtgacagatcacggctcgtgcgtccgagcctgtggggccgacagctatgagatggaggaagacggcgtccgcaagtgtaagaagtgcgaagggccttgccgcaaagtgtgtaacggaataggtattggtgaatttaaagactcactctccataaatgctacgaatattaaacacttcaaaaactgcacctccatcagtggcgatctccacatcctgccggtggcatttaggggtgactccttcacacatactcctcctctggatccacaggaactggatattctgaaaaccgtaaaggaaatcacagggtttttgctgattcaggcttggcctgaaaacaggacggacctccatgcctttgagaacctagaaatcatacgcggcaggaccaagcaacatggtcagttttctcttgcagtcgtcagcctgaacataacatccttgggattacgctccctcaaggagataagtgatggagatgtgataatttcaggaaacaaaaatttgtgctatgcaaatacaataaactggaaaaaactgtttgggacctccggtcagaaaaccaaaattataagcaacagaggtgaaaacagctgcaaggccacaggccaggtctgccatgccttgtgctcccccgagggctgctggggcccggagcccagggactgcgtctcttgccggaatgtcagccgaggcagggaatgcgtggacaagtgcaaccttctggagggtgagccaagggagtttgtggagaactctgagtgcatacagtgccacccagagtgcctgcctcaggccatgaacatcacctgcacaggacggggaccagacaactgtatccagtgtgcccactacattgacggcccccactgcgtcaagacctgcccggcaggagtcatgggagaaaacaacaccctggtctggaagtacgcagacgccggccatgtgtgccacctgtgccatccaaactgcacctacggatgcactgggccaggtcttgaaggctgtccaacgaatgggcctaagatcccgtccatcgccactgggatggtgggggccctcctcttgctgctggtggtggccctggggatcggcctcttcatgcgaaggcgccacatcgttcggaagcgcacgctgcggaggctgctgcaggagagggagcttgtggagcctcttacacccagtggagaagctcccaaccaagctctcttgaggatcttgaaggaaactgaattcaaaaagatcaaagtgctgggctccggtgcgttcggcacggtgtataagggactctggatcccagaaggtgagaaagttaaaattcccgtcgctatcaaggaattaagagaagcaacatctccgaaagccaacaaggaaatcctcgatgaagcctacgtgatggccagcgtggacaacccccacgtgtgccgcctgctgggcatctgcctcacctccaccgtgcagctcatcacgcagctcatgcccttcggctgcctcctggactatgtccgggaacacaaagacaatattggctcccagtacctgctcaactggtgtgtgcagatcgcaaagggcatgaactacttggaggaccgtcgcttggtgcaccgcgacctggcagccaggaacgtactggtgaaaacaccgcagcatgtcaagatcacagattttgggctggccaaactgctgggtgcggaagagaaagaataccatgcagaaggaggcaaagtgcctatcaagtggatggcattggaatcaattttacacagaatctatacccaccagagtgatgtctggagctacggggtgactgtttgggagttgatgacctttggatccaagccatatgacggaatccctgccagcgagatctcctccatcctggagaaaggagaacgcctccctcagccacccatatgtaccatcgatgtctacatgatcatggtcaagtgctggatgatagacgcagatagtcgcccaaagttccgtgagttgatcatcgaattctccaaaatggcccgagacccccagcgctaccttgtcattcagggggatgaaagaatgcatttgccaagtcctacagactccaacttctaccgtgccctgatggatgaagaagacatggacgacgtggtggatgccgacgagtacctcatcccacagcagggcttcttcagcagcccctccacgtcacggactcccctcctgagctctctgagtgcaaccagcaacaattccaccgtggcttgcattgatagaaatgggctgcaaagctgtcccatcaaggaagacagcttcttgcagcgatacagctcagaccccacaggcgccttgactgaggacagcatagacgacaccttcctcccagtgcctgaatacataaaccagtccgttcccaaaaggcccgctggctctgtgcagaatcctgtctatcacaatcagcctctgaaccccgcgcccagcagagacccacactaccaggacccccacagcactgcagtgggcaaccccgagtatctcaacactgtccagcccacctgtgtcaacagcacattcgacagccctgcccactgggcccagaaaggcagccaccaaattagcctggacaaccctgactaccagcaggacttctttcccaaggaagccaagccaaatggcatctttaagggctccacagctgaaaatgcagaatacctaagggtcgcgccacaaagcagtgaatttattggagcatgaccacggaggatagtatgagccctaaaaatccagactctttcgatacccaggaccaagccacagcaggtcctccatcccaacagccatgcccgcattagctcttagacccacagactggttttgcaacgtttacaccgactagccaggaagtacttccacctcgggcacattttgggaagttgcattcctttgtcttcaaactgtgaagcatttacagaaacgcatccagcaagaatattgtccctttgagcagaaatttatctttcaaagaggtatatttgaaaaaaaaaaaaagtatatgtgaggatttttattgattggggatcttggagtttttcattgtcgctattgatttttacttcaatgggctcttccaacaaggaagaagcttgctggtagcacttgctaccctgagttcatccaggcccaactgtgagcaaggagcacaagccacaagtcttccagaggatgcttgattccagtggttctgcttcaaggcttccactgcaaaacactaaagatccaagaaggccttcatggccccagcaggccggatcggtactgtatcaagtcatggcaggtacagtaggataagccactctgtcccttcctgggcaaagaagaaacggaggggatggaattcttccttagacttacttttgtaaaaatgtccccacggtacttactccccactgatggaccagtggtttccagtcatgagcgttagactgacttgtttgtcttccattccattgttttgaaactcagtatgctgcccctgtcttgctgtcatgaaatcagcaagagaggatgacacatcaaataataactcggattccagcccacattggattcatcagcatttggaccaatagcccacagctgagaatgtggaatacctaaggatagcaccgcttttgttctcgcaaaaacgtatctcctaatttgaggctcagatgaaatgcatcaggtcctttggggcatagatcagaagactacaaaaatgaagctgctctgaaatctcctttagccatcaccccaaccccccaaaattagtttgtgttacttatggaagatagttttctccttttacttcacttcaaaagctttttactcaaagagtatatgttccctccaggtcagctgcccccaaaccccctccttacgctttgtcacacaaaaagtgtctctgccttgagtcatctattcaagcacttacagctctggccacaacagggcattttacaggtgcgaatgacagtagcattatgagtagtgtggaattcaggtagtaaatatgaaactagggtttgaaattgataatgctttcacaacatttgcagatgttttagaaggaaaaaagttccttcctaaaataatttctctacaattggaagattggaagattcagctagttaggagcccaccttttttcctaatctgtgtgtgccctgtaacctgactggttaacagcagtcctttgtaaacagtgttttaaactctcctagtcaatatccaccccatccaatttatcaaggaagaaatggttcagaaaatattttcagcctacagttatgttcagtcacacacacatacaaaatgttccttttgcttttaaagtaatttttgactcccagatcagtcagagcccctacagcattgttaagaaagtatttgatttttgtctcaatgaaaataaaactatattcatttccactctattatgctctcaaatacccctaagcatctatactagcctggtatgggtatgaaagatacaaagataaataaaacatagtccctgattctaagaaattcacaatttagcaaaggaaatggactcatagatgctaaccttaaaacaacgtgacaaatgccagacaggacccatcagccaggcactgtgagagcacagagcagggaggttgggtcctgcctgaggagacctggaagggaggcctcacaggaggatgaccaggtctcagtcagcggggaggtggaaagtgcaggtgcatcaggggcaccctgaccgaggaaacagctgccagaggcctccactgctaaagtccacataaggctgaggtcagtcaccctaaacaacctgctccctctaagccaggggatgagcttggagcatcccacaagttccctaaaagttgcagcccccagggggattttgagctatcatctctgcacatgcttagtgagaagactacacaacatttctaagaatctgagattttatattgtcagttaaccactttcattattcattcacctcaggacatgcagaaatatttcagtcagaactgggaaacagaaggacctacattctgctgtcacttatgtgtcaagaagcagatgatcgatgaggcaggtcagttgtaagtgagtcacattgtagcattaaattctagtatttttgtagtttgaaacagtaacttaataaaagagcaaaagctattctagctttcttcttcatattttaattttccaccataaagtttagttgctaaattctattaattttaagattgtgcttcccaaaatagttctcacttcatctgtccagggaggcacagttctgtctggtagaagccgcaaagcccttagcctcttcacggatctggcgactgtgatgggcaggtcaggagaggagctgcccaaagtcccatgattttcacctaacagccctgatcagtcagtactcaaagcttggactccatccctgaaggtcttcctgattgatagcctggccttaataccctacagaaagcctgtccattggctgtttcttcctcagtcagttcctggaagaccttaccccatgaccccagcttcagatgtggtctttggaaacagaggtcgaaggaaagtaaggagctgagagctcacattcataggtgccgccagccttcgtgcatcttcttgcatcatctctaaggagctcctctaattacaccatgcccgtcaccccatgagggatcagagaagggatgagtcttctaaactctatattcgctgtgagtccaggttgtaagggggagcactgtggatgcatcctattgcactccagctgatgacaccaaagcttaggtgtttgctgaaagttcttgatgttgtgacttaccacccctgcctcacaactgcagacataaggggactatggattgcttagcaggaaaggcactggttctcaagggcggctgcccttgggaatcttctggtcccaaccagaaagactgtggcttgattttctcaggtgcagcccagccgtagggccttttcagagcaccccctggttattgcaacattcatcaaagtttctagaacctctggcctaaaggaagggcctggtgggatctacttggcactcgctggggggccaccccccagtgccactctcactaggcctctgattgcacttgtgtaggatgaagctggtgggtgatgggaactcagcacctcccctcaggcagaaaagaatcatctgtggagcttcaaaagaaggggcctggagtctctgcagaccaattcaacccaaatctcgggggctctttcatgattctaatgggcaaccagggttgaaacccttatttctagggtcttcagttgtacaagactgtgggtctgtaccagagcccccgtcagagtagaataaaaggctgggtagggtagagattcccatgtgcagtggagagaacaatctgcagtcactgataagcctgagacttggctcatttcaaaagcgttcaattcatcctcaccagcagttcagctggaaaggggcaaatacccccacctgagctttgaaaacgccctgggaccctctgcattctctaagtaagttatagaaaccagtctcttccctcctttgtgagtgagctgctattccacgtaggcaacacctgttgaaattgccctcaatgtctactctgcatttctttcttgtgataagcacacacttttattgcaacataatgatctgctcacatttccttgcctgggggctgtaaaaccttacagaacagaaatccttgcctctttcaccagccacacctgccataccaggggtacagctttgtactattgaagacacagacaggatttttaaatgtaaatctatttttgtaactttgttgcgggatatagttctctttatgtagcactgaactttgtacaatatatttttagaaactcatttttctactaaaacaaacacagtttactttagagagactgcaatagaatcaaaatttgaaactgaaatctttgtttaaaagggttaagttgaggcaagaggaaagccctttctctctcttataaaaaggcacaacctcattggggagctaagctaggtcattgtcatggtgaagaagagaagcatcgtttttatatttaggaaattttaaaagatgatggaaagcacatttagcttggtctgaggcaggttctgttggggcagtgttaatggaaagggctcactgttgttactactagaaaaatccagttgcatgccatactctcatcatctgccagtgtaaccctgtacatgtaagaaaagcaataacatagcactttgttggtttatatatataatgtgacttcaatgcaaattttatttttatatttacaattgatatgcatttaccagtataaactagacatgtctggagagcctaataatgttcagcacactttggttagttcaccaacagtcttaccaagcctgggcccagccaccctagagaagttattcagccctggctgcagtgacatcacctgaggagcttttaaaagcttgaagcccagctacacctcagaccgattaaacgcaaatctctggggctgaaacccaagcattcgtagtttttaaagctcctgaggtcattccaatgtgcggccaaagttgagaactactggcctagggattagccacaaggacatggacttggaggcaaattctgcaggtgtatgtgattctcaggcctagagagctaagacacaaagacctccacatctgtcgctgagagtcaagaacctgaacagagtttccatgaaggttctccaagcactagaagggagagtgtctaaacaatggttgaaaagcaaaggaaatataaaacagacacctctttccatttcctaaggtttctctctttattaagggtggactagtaataaaatataatattcttgctgcttatgcagctgacattgttgccctccctaaagcaaccaagtagcctttatttcccacagtgaaagaaaacgctggcctatcagttacattacaaaaggcagatttcaagaggattgagtaagtagttggatggctttcataaaaacaagaattcaagaagaggattcatgctttaagaaacatttgttatacattcctcacaaattatacctgggataaaaactatgtagcaggcagtgtgttttccttccatgtctctctgcactacctgcagtgtgtcctctgaggctgcaagtctgtcctatctgaattcccagcagaagcactaagaagctccaccctatcacctagcagataaaactatggggaaaacttaaatctgtgcatacatttctggatgcatttacttatctttaaaaaaaaaggaatcctatgacctgatttggccacaaaaataatcttgctgtacaatacaatctcttggaaattaagagatcctatggatttgatgactggtattagaggtgacaatgtaaccgattaacaacagacagcaataacttcgttttagaaacattcaagcaatagctttatagcttcaacatatggtacgttttaaccttgaaagttttgcaatgatgaaagcagtatttgtacaaatgaaaagcagaattctcttttatatggtttatactgttgatcagaaatgttgattgtgcattgagtattaaaaaattagatgtatattattcattgttctttactcctgagtaccttataataataataatgtattctttgttaacaa

SEQ ID NO: 425 - DNA, 5293 bp, Artificial Sequence
  Description of Artificial Sequence: Synthetic polynucleotide
ctaggcggcggccgcggcggcggaggcagcagcggcggcggcagtggcggcggcgaaggtggcggcggctcggccagtactcccggcccccgccatttcggactgggagcgagcgcggcgcaggcactgaaggcggcggcggggccagaggctcagcggctcccaggcctgctgaaaatgactgaatataaacttgtggtagttggagctggtggcgtaggcaagagtgccttgacgatacagctaattcagaatcattttgtggacgaatatgatccaacaatagaggattcctacaggaagcaagtagtaattgatggagaaacctgtctcttggatattctcgacacagcaggtcaagaggagtacagtgcaatgagggaccagtacatgaggactggggagggctttctttgtgtatttgccataaataatactaaatcatttgaagatattcaccattatagagaacaaattaaaagagttaaggactctgaagatgtacctatggtcctagtaggaaataaatgtgatttgccttctagaacagtagacacaaaacaggctcaggacttagcaagaagttatggaattccttttattgaaacatcagcaaagacaagacagggtgttgatgatgccttctatacattagttcgagaaattcgaaaacataaagaaaagatgagcaaagatggtaaaaagaagaaaaagaagtcaaagacaaagtgtgtaattatgtaaatacaatttgtacttttttcttaaggcatactagtacaagtggtaatttttgtacattacactaaattattagcatttgttttagcattacctaatttttttcctgctccatgcagactgttagcttttaccttaaatgcttattttaaaatgacagtggaagtttttttttcctctaagtgccagtattcccagagttttggtttttgaactagcaatgcctgtgaaaaagaaactgaatacctaagatttctgtcttggggcttttggtgcatgcagttgattacttcttatttttcttaccaattgtgaatgttggtgtgaaacaaattaatgaagcttttgaatcatccctattctgtgttttatctagtcacataaatggattaattactaatttcagttgagaccttctaattggtttttactgaaacattgagggaacacaaatttatgggcttcctgatgatgattcttctaggcatcatgtcctatagtttgtcatccctgatgaatgtaaagttacactgttcacaaaggttttgtctcctttccactgctattagtcatggtcactctccccaaaatattatattttttctataaaaagaaaaaaatggaaaaaaattacaaggcaatggaaactattataaggccatttccttttcacattagataaattactataaagactcctaatagcttttcctgttaaggcagacccagtatgaaatggggattattatagcaaccattttggggctatatttacatgctactaaatttttataataattgaaaagattttaacaagtataaaaaattctcataggaattaaatgtagtctccctgtgtcagactgctctttcatagtataactttaaatcttttcttcaacttgagtctttgaagatagttttaattctgcttgtgacattaaaagattatttgggccagttatagcttattaggtgttgaagagaccaaggttgcaaggccaggccctgtgtgaacctttgagctttcatagagagtttcacagcatggactgtgtccccacggtcatccagtgttgtcatgcattggttagtcaaaatggggagggactagggcagtttggatagctcaacaagatacaatctcactctgtggtggtcctgctgacaaatcaagagcattgcttttgtttcttaagaaaacaaactcttttttaaaaattacttttaaatattaactcaaaagttgagattttggggtggtggtgtgccaagacattaattttttttttaaacaatgaagtgaaaaagttttacaatctctaggtttggctagttctcttaacactggttaaattaacattgcataaacacttttcaagtctgatccatatttaataatgctttaaaataaaaataaaaacaatccttttgataaatttaaaatgttacttattttaaaataaatgaagtgagatggcatggtgaggtgaaagtatcactggactaggaagaaggtgacttaggttctagataggtgtcttttaggactctgattttgaggacatcacttactatccatttcttcatgttaaaagaagtcatctcaaactcttagttttttttttttacaactatgtaatttatattccatttacataaggatacacttatttgtcaagctcagcacaatctgtaaatttttaacctatgttacaccatcttcagtgccagtcttgggcaaaattgtgcaagaggtgaagtttatatttgaatatccattctcgttttaggactcttcttccatattagtgtcatcttgcctccctaccttccacatgccccatgacttgatgcagttttaatacttgtaattcccctaaccataagatttactgctgctgtggatatctccatgaagttttcccactgagtcacatcagaaatgccctacatcttatttcctcagggctcaagagaatctgacagataccataaagggatttgacctaatcactaattttcaggtggtggctgatgctttgaacatctctttgctgcccaatccattagcgacagtaggatttttcaaacctggtatgaatagacagaaccctatccagtggaaggagaatttaataaagatagtgctgaaagaattccttaggtaatctataactaggactactcctggtaacagtaatacattccattgttttagtaaccagaaatcttcatgcaatgaaaaatactttaattcatgaagcttactttttttttttggtgtcagagtctcgctcttgtcacccaggctggaatgcagtggcgccatctcagctcactgcaacctccatctcccaggttcaagcgattctcgtgcctcggcctcctgagtagctgggattacaggcgtgtgccactacactcaactaatttttgtatttttaggagagacggggtttcaccctgttggccaggctggtctcgaactcctgacctcaagtgattcacccaccttggcctcataaacctgttttgcagaactcatttattcagcaaatatttattgagtgcctaccagatgccagtcaccacacaaggcactgggtatatggtatccccaaacaagagacataatcccggtccttaggtagtgctagtgtggtctgtaatatcttactaaggcctttggtatacgacccagagataacacgatgcgtattttagttttgcaaagaaggggtttggtctctgtgccagctctataattgttttgctacgattccactgaaactcttcgatcaagctactttatgtaaatcacttcattgttttaaaggaataaacttgattatattgtttttttatttggcataactgtgattcttttaggacaattactgtacacattaaggtgtatgtcagatattcatattgacccaaatgtgtaatattccagttttctctgcataagtaattaaaatatacttaaaaattaatagttttatctgggtacaaataaacaggtgcctgaactagttcacagacaaggaaacttctatgtaaaaatcactatgatttctgaattgctatgtgaaactacagatctttggaacactgtttaggtagggtgttaagacttacacagtacctcgtttctacacagagaaagaaatggccatacttcaggaactgcagtgcttatgaggggatatttaggcctcttgaatttttgatgtagatgggcatttttttaaggtagtggttaattacctttatgtgaactttgaatggtttaacaaaagatttgtttttgtagagattttaaagggggagaattctagaaataaatgttacctaattattacagccttaaagacaaaaatccttgttgaagtttttttaaaaaaagctaaattacatagacttaggcattaacatgtttgtggaagaatatagcagacgtatattgtatcatttgagtgaatgttcccaagtaggcattctaggctctatttaactgagtcacactgcataggaatttagaacctaacttttataggttatcaaaactgttgtcaccattgcacaattttgtcctaatatatacatagaaactttgtggggcatgttaagttacagtttgcacaagttcatctcatttgtattccattgattttttttttcttctaaacattttttcttcaaacagtatataactttttttaggggatttttttttagacagcaaaaactatctgaagatttccatttgtcaaaaagtaatgatttcttgataattgtgtagtaatgttttttagaacccagcagttaccttaaagctgaatttatatttagtaacttctgtgttaatactggatagcatgaattctgcattgagaaactgaatagctgtcataaaatgaaactttctttctaaagaaagatactcacatgagttcttgaagaatagtcataactagattaagatctgtgttttagtttaatagtttgaagtgcctgtttgggataatgataggtaatttagatgaatttaggggaaaaaaaagttatctgcagatatgttgagggcccatctctccccccacacccccacagagctaactgggttacagtgttttatccgaaagtttccaattccactgtcttgtgttttcatgttgaaaatacttttgcatttttcctttgagtgccaatttcttactagtactatttcttaatgtaacatgtttacctggaatgtattttaactatttttgtatagtgtaaactgaaacatgcacattttgtacattgtgctttcttttgtgggacatatgcagtgtgatccagttgttttccatcatttggttgcgctgacctaggaatgttggtcatatcaaacattaaaaatgaccactcttttaattgaaattaacttttaaatgtttataggagtatgtgctgtgaagtgatctaaaatttgtaatatttttgtcatgaactgtactactcctaattattgtaatgtaataaaaatagttacagtgac

SEQ ID NO: 426 - DNA, 5417 bp, Artificial Sequence
  Description of Artificial Sequence: Synthetic polynucleotide
ctaggcggcggccgcggcggcggaggcagcagcggcggcggcagtggcggcggcgaaggtggcggcggctcggccagtactcccggcccccgccatttcggactgggagcgagcgcggcgcaggcactgaaggcggcggcggggccagaggctcagcggctcccaggcctgctgaaaatgactgaatataaacttgtggtagttggagctggtggcgtaggcaagagtgccttgacgatacagctaattcagaatcattttgtggacgaatatgatccaacaatagaggattcctacaggaagcaagtagtaattgatggagaaacctgtctcttggatattctcgacacagcaggtcaagaggagtacagtgcaatgagggaccagtacatgaggactggggagggctttctttgtgtatttgccataaataatactaaatcatttgaagatattcaccattatagagaacaaattaaaagagttaaggactctgaagatgtacctatggtcctagtaggaaataaatgtgatttgccttctagaacagtagacacaaaacaggctcaggacttagcaagaagttatggaattccttttattgaaacatcagcaaagacaagacagagagtggaggatgctttttatacattggtgagagagatccgacaatacagattgaaaaaaatcagcaaagaagaaaagactcctggctgtgtgaaaattaaaaaatgcattataatgtaatctgggtgttgatgatgccttctatacattagttcgagaaattcgaaaacataaagaaaagatgagcaaagatggtaaaaagaagaaaaagaagtcaaagacaaagtgtgtaattatgtaaatacaatttgtacttttttcttaaggcatactagtacaagtggtaatttttgtacattacactaaattattagcatttgttttagcattacctaatttttttcctgctccatgcagactgttagcttttaccttaaatgcttattttaaaatgacagtggaagtttttttttcctctaagtgccagtattcccagagttttggtttttgaactagcaatgcctgtgaaaaagaaactgaatacctaagatttctgtcttggggcttttggtgcatgcagttgattacttcttatttttcttaccaattgtgaatgttggtgtgaaacaaattaatgaagcttttgaatcatccctattctgtgttttatctagtcacataaatggattaattactaatttcagttgagaccttctaattggtttttactgaaacattgagggaacacaaatttatgggcttcctgatgatgattcttctaggcatcatgtcctatagtttgtcatccctgatgaatgtaaagttacactgttcacaaaggttttgtctcctttccactgctattagtcatggtcactctccccaaaatattatattttttctataaaaagaaaaaaatggaaaaaaattacaaggcaatggaaactattataaggccatttccttttcacattagataaattactataaagactcctaatagcttttcctgttaaggcagacccagtatgaaatggggattattatagcaaccattttggggctatatttacatgctactaaatttttataataattgaaaagattttaacaagtataaaaaattctcataggaattaaatgtagtctccctgtgtcagactgctctttcatagtataactttaaatcttttcttcaacttgagtctttgaagatagttttaattctgcttgtgacattaaaagattatttgggccagttatagcttattaggtgttgaagagaccaaggttgcaaggccaggccctgtgtgaacctttgagctttcatagagagtttcacagcatggactgtgtccccacggtcatccagtgttgtcatgcattggttagtcaaaatggggagggactagggcagtttggatagctcaacaagatacaatctcactctgtggtggtcctgctgacaaatcaagagcattgcttttgtttcttaagaaaacaaactcttttttaaaaattacttttaaatattaactcaaaagttgagattttggggtggtggtgtgccaagacattaattttttttttaaacaatgaagtgaaaaagttttacaatctctaggtttggctagttctcttaacactggttaaattaacattgcataaacacttttcaagtctgatccatatttaataatgctttaaaataaaaataaaaacaatccttttgataaatttaaaatgttacttattttaaaataaatgaagtgagatggcatggtgaggtgaaagtatcactggactaggaagaaggtgacttaggttctagataggtgtcttttaggactctgattttgaggacatcacttactatccatttcttcatgttaaaagaagtcatctcaaactcttagttttttttttttacaactatgtaatttatattccatttacataaggatacacttatttgtcaagctcagcacaatctgtaaatttttaacctatgttacaccatcttcagtgccagtcttgggcaaaattgtgcaagaggtgaagtttatatttgaatatccattctcgttttaggactcttcttccatattagtgtcatcttgcctccctaccttccacatgccccatgacttgatgcagttttaatacttgtaattcccctaaccataagatttactgctgctgtggatatctccatgaagttttcccactgagtcacatcagaaatgccctacatcttatttcctcagggctcaagagaatctgacagataccataaagggatttgacctaatcactaattttcaggtggtggctgatgctttgaacatctctttgctgcccaatccattagcgacagtaggatttttcaaacctggtatgaatagacagaaccctatccagtggaaggagaatttaataaagatagtgctgaaagaattccttaggtaatctataactaggactactcctggtaacagtaatacattccattgttttagtaaccagaaatcttcatgcaatgaaaaatactttaattcatgaagcttactttttttttttggtgtcagagtctcgctcttgtcacccaggctggaatgcagtggcgccatctcagctcactgcaacctccatctcccaggttcaagcgattctcgtgcctcggcctcctgagtagctgggattacaggcgtgtgccactacactcaactaatttttgtatttttaggagagacggggtttcaccctgttggccaggctggtctcgaactcctgacctcaagtgattcacccaccttggcctcataaacctgttttgcagaactcatttattcagcaaatatttattgagtgcctaccagatgccagtcaccacacaaggcactgggtatatggtatccccaaacaagagacataatcccggtccttaggtagtgctagtgtggtctgtaatatcttactaaggcctttggtatacgacccagagataacacgatgcgtattttagttttgcaaagaaggggtttggtctctgtgccagctctataattgttttgctacgattccactgaaactcttcgatcaagctactttatgtaaatcacttcattgttttaaaggaataaacttgattatattgtttttttatttggcataactgtgattcttttaggacaattactgtacacattaaggtgtatgtcagatattcatattgacccaaatgtgtaatattccagttttctctgcataagtaattaaaatatacttaaaaattaatagttttatctgggtacaaataaacaggtgcctgaactagttcacagacaaggaaacttctatgtaaaaatcactatgatttctgaattgctatgtgaaactacagatctttggaacactgtttaggtagggtgttaagacttacacagtacctcgtttctacacagagaaagaaatggccatacttcaggaactgcagtgcttatgaggggatatttaggcctcttgaatttttgatgtagatgggcatttttttaaggtagtggttaattacctttatgtgaactttgaatggtttaacaaaagatttgtttttgtagagattttaaagggggagaattctagaaataaatgttacctaattattacagccttaaagacaaaaatccttgttgaagtttttttaaaaaaagctaaattacatagacttaggcattaacatgtttgtggaagaatatagcagacgtatattgtatcatttgagtgaatgttcccaagtaggcattctaggctctatttaactgagtcacactgcataggaatttagaacctaacttttataggttatcaaaactgttgtcaccattgcacaattttgtcctaatatatacatagaaactttgtggggcatgttaagttacagtttgcacaagttcatctcatttgtattccattgattttttttttcttctaaacattttttcttcaaacagtatataactttttttaggggatttttttttagacagcaaaaactatctgaagatttccatttgtcaaaaagtaatgatttcttgataattgtgtagtaatgttttttagaacccagcagttaccttaaagctgaatttatatttagtaacttctgtgttaatactggatagcatgaattctgcattgagaaactgaatagctgtcataaaatgaaactttctttctaaagaaagatactcacatgagttcttgaagaatagtcataactagattaagatctgtgttttagtttaatagtttgaagtgcctgtttgggataatgataggtaatttagatgaatttaggggaaaaaaaagttatctgcagatatgttgagggcccatctctccccccacacccccacagagctaactgggttacagtgttttatccgaaagtttccaattccactgtcttgtgttttcatgttgaaaatacttttgcatttttcctttgagtgccaatttcttactagtactatttcttaatgtaacatgtttacctggaatgtattttaactatttttgtatagtgtaaactgaaacatgcacattttgtacattgtgctttcttttgtgggacatatgcagtgtgatccagttgttttccatcatttggttgcgctgacctaggaatgttggtcatatcaaacattaaaaatgaccactcttttaattgaaattaacttttaaatgtttataggagtatgtgctgtgaagtgatctaaaatttgtaatatttttgtcatgaactgtactactcctaattattgtaatgtaataaaaatagttacagtgac

SEQ ID NO: 427 - DNA, 5306 bp, Artificial Sequence
  Description of Artificial Sequence: Synthetic polynucleotide
ctaggcggcggccgcggcggcggaggcagcagcggcggcggcagtggcggcggcgaaggtggcggcggctcggccagtactcccggcccccgccatttcggactgggagcgagcgcggcgcaggcactgaaggcggcggcggggccagaggctcagcggctcccaggtgcgggagagaggcctgctgaaaatgactgaatataaacttgtggtagttggagctggtggcgtaggcaagagtgccttgacgatacagctaattcagaatcattttgtggacgaatatgatccaacaatagaggattcctacaggaagcaagtagtaattgatggagaaacctgtctcttggatattctcgacacagcaggtcaagaggagtacagtgcaatgagggaccagtacatgaggactggggagggctttctttgtgtatttgccataaataatactaaatcatttgaagatattcaccattatagagaacaaattaaaagagttaaggactctgaagatgtacctatggtcctagtaggaaataaatgtgatttgccttctagaacagtagacacaaaacaggctcaggacttagcaagaagttatggaattccttttattgaaacatcagcaaagacaagacagggtgttgatgatgccttctatacattagttcgagaaattcgaaaacataaagaaaagatgagcaaagatggtaaaaagaagaaaaagaagtcaaagacaaagtgtgtaattatgtaaatacaatttgtacttttttcttaaggcatactagtacaagtggtaatttttgtacattacactaaattattagcatttgttttagcattacctaatttttttcctgctccatgcagactgttagcttttaccttaaatgcttattttaaaatgacagtggaagtttttttttcctctaagtgccagtattcccagagttttggtttttgaactagcaatgcctgtgaaaaagaaactgaatacctaagatttctgtcttggggcttttggtgcatgcagttgattacttcttatttttcttaccaattgtgaatgttggtgtgaaacaaattaatgaagcttttgaatcatccctattctgtgttttatctagtcacataaatggattaattactaatttcagttgagaccttctaattggtttttactgaaacattgagggaacacaaatttatgggcttcctgatgatgattcttctaggcatcatgtcctatagtttgtcatccctgatgaatgtaaagttacactgttcacaaaggttttgtctcctttccactgctattagtcatggtcactctccccaaaatattatattttttctataaaaagaaaaaaatggaaaaaaattacaaggcaatggaaactattataaggccatttccttttcacattagataaattactataaagactcctaatagcttttcctgttaaggcagacccagtatgaaatggggattattatagcaaccattttggggctatatttacatgctactaaatttttataataattgaaaagattttaacaagtataaaaaattctcataggaattaaatgtagtctccctgtgtcagactgctctttcatagtataactttaaatcttttcttcaacttgagtctttgaagatagttttaattctgcttgtgacattaaaagattatttgggccagttatagcttattaggtgttgaagagaccaaggttgcaaggccaggccctgtgtgaacctttgagctttcatagagagtttcacagcatggactgtgtccccacggtcatccagtgttgtcatgcattggttagtcaaaatggggagggactagggcagtttggatagctcaacaagatacaatctcactctgtggtggtcctgctgacaaatcaagagcattgcttttgtttcttaagaaaacaaactcttttttaaaaattacttttaaatattaactcaaaagttgagattttggggtggtggtgtgccaagacattaattttttttttaaacaatgaagtgaaaaagttttacaatctctaggtttggctagttctcttaacactggttaaattaacattgcataaacacttttcaagtctgatccatatttaataatgctttaaaataaaaataaaaacaatccttttgataaatttaaaatgttacttattttaaaataaatgaagtgagatggcatggtgaggtgaaagtatcactggactaggaagaaggtgacttaggttctagataggtgtcttttaggactctgattttgaggacatcacttactatccatttcttcatgttaaaagaagtcatctcaaactcttagttttttttttttacaactatgtaatttatattccatttacataaggatacacttatttgtcaagctcagcacaatctgtaaatttttaacctatgttacaccatcttcagtgccagtcttgggcaaaattgtgcaagaggtgaagtttatatttgaatatccattctcgttttaggactcttcttccatattagtgtcatcttgcctccctaccttccacatgccccatgacttgatgcagttttaatacttgtaattcccctaaccataagatttactgctgctgtggatatctccatgaagttttcccactgagtcacatcagaaatgccctacatcttatttcctcagggctcaagagaatctgacagataccataaagggatttgacctaatcactaattttcaggtggtggctgatgctttgaacatctctttgctgcccaatccattagcgacagtaggatttttcaaacctggtatgaatagacagaaccctatccagtggaaggagaatttaataaagatagtgctgaaagaattccttaggtaatctataactaggactactcctggtaacagtaatacattccattgttttagtaaccagaaatcttcatgcaatgaaaaatactttaattcatgaagcttactttttttttttggtgtcagagtctcgctcttgtcacccaggctggaatgcagtggcgccatctcagctcactgcaacctccatctcccaggttcaagcgattctcgtgcctcggcctcctgagtagctgggattacaggcgtgtgccactacactcaactaatttttgtatttttaggagagacggggtttcaccctgttggccaggctggtctcgaactcctgacctcaagtgattcacccaccttggcctcataaacctgttttgcagaactcatttattcagcaaatatttattgagtgcctaccagatgccagtcaccacacaaggcactgggtatatggtatccccaaacaagagacataatcccggtccttaggtagtgctagtgtggtctgtaatatcttactaaggcctttggtatacgacccagagataacacgatgcgtattttagttttgcaaagaaggggtttggtctctgtgccagctctataattgttttgctacgattccactgaaactcttcgatcaagctactttatgtaaatcacttcattgttttaaaggaataaacttgattatattgtttttttatttggcataactgtgattcttttaggacaattactgtacacattaaggtgtatgtcagatattcatattgacccaaatgtgtaatattccagttttctctgcataagtaattaaaatatacttaaaaattaatagttttatctgggtacaaataaacaggtgcctgaactagttcacagacaaggaaacttctatgtaaaaatcactatgatttctgaattgctatgtgaaactacagatctttggaacactgtttaggtagggtgttaagacttacacagtacctcgtttctacacagagaaagaaatggccatacttcaggaactgcagtgcttatgaggggatatttaggcctcttgaatttttgatgtagatgggcatttttttaaggtagtggttaattacctttatgtgaactttgaatggtttaacaaaagatttgtttttgtagagattttaaagggggagaattctagaaataaatgttacctaattattacagccttaaagacaaaaatccttgttgaagtttttttaaaaaaagctaaattacatagacttaggcattaacatgtttgtggaagaatatagcagacgtatattgtatcatttgagtgaatgttcccaagtaggcattctaggctctatttaactgagtcacactgcataggaatttagaacctaacttttataggttatcaaaactgttgtcaccattgcacaattttgtcctaatatatacatagaaactttgtggggcatgttaagttacagtttgcacaagttcatctcatttgtattccattgattttttttttcttctaaacattttttcttcaaacagtatataactttttttaggggatttttttttagacagcaaaaactatctgaagatttccatttgtcaaaaagtaatgatttcttgataattgtgtagtaatgttttttagaacccagcagttaccttaaagctgaatttatatttagtaacttctgtgttaatactggatagcatgaattctgcattgagaaactgaatagctgtcataaaatgaaactttctttctaaagaaagatactcacatgagttcttgaagaatagtcataactagattaagatctgtgttttagtttaatagtttgaagtgcctgtttgggataatgataggtaatttagatgaatttaggggaaaaaaaagttatctgcagatatgttgagggcccatctctccccccacacccccacagagctaactgggttacagtgttttatccgaaagtttccaattccactgtcttgtgttttcatgttgaaaatacttttgcatttttcctttgagtgccaatttcttactagtactatttcttaatgtaacatgtttacctggaatgtattttaactatttttgtatagtgtaaactgaaacatgcacattttgtacattgtgctttcttttgtgggacatatgcagtgtgatccagttgttttccatcatttggttgcgctgacctaggaatgttggtcatatcaaacattaaaaatgaccactcttttaattgaaattaacttttaaatgtttataggagtatgtgctgtgaagtgatctaaaatttgtaatatttttgtcatgaactgtactactcctaattattgtaatgtaataaaaatagttacagtgac

SEQ ID NO: 428 - DNA, 5430 bp, Artificial Sequence
  Description of Artificial Sequence: Synthetic polynucleotide
ctaggcggcggccgcggcggcggaggcagcagcggcggcggcagtggcggcggcgaaggtggcggcggctcggccagtactcccggcccccgccatttcggactgggagcgagcgcggcgcaggcactgaaggcggcggcggggccagaggctcagcggctcccaggtgcgggagagaggcctgctgaaaatgactgaatataaacttgtggtagttggagctggtggcgtaggcaagagtgccttgacgatacagctaattcagaatcattttgtggacgaatatgatccaacaatagaggattcctacaggaagcaagtagtaattgatggagaaacctgtctcttggatattctcgacacagcaggtcaagaggagtacagtgcaatgagggaccagtacatgaggactggggagggctttctttgtgtatttgccataaataatactaaatcatttgaagatattcaccattatagagaacaaattaaaagagttaaggactctgaagatgtacctatggtcctagtaggaaataaatgtgatttgccttctagaacagtagacacaaaacaggctcaggacttagcaagaagttatggaattccttttattgaaacatcagcaaagacaagacagagagtggaggatgctttttatacattggtgagagagatccgacaatacagattgaaaaaaatcagcaaagaagaaaagactcctggctgtgtgaaaattaaaaaatgcattataatgtaatctgggtgttgatgatgccttctatacattagttcgagaaattcgaaaacataaagaaaagatgagcaaagatggtaaaaagaagaaaaagaagtcaaagacaaagtgtgtaattatgtaaatacaatttgtacttttttcttaaggcatactagtacaagtggtaatttttgtacattacactaaattattagcatttgttttagcattacctaatttttttcctgctccatgcagactgttagcttttaccttaaatgcttattttaaaatgacagtggaagtttttttttcctctaagtgccagtattcccagagttttggtttttgaactagcaatgcctgtgaaaaagaaactgaatacctaagatttctgtcttggggcttttggtgcatgcagttgattacttcttatttttcttaccaattgtgaatgttggtgtgaaacaaattaatgaagcttttgaatcatccctattctgtgttttatctagtcacataaatggattaattactaatttcagttgagaccttctaattggtttttactgaaacattgagggaacacaaatttatgggcttcctgatgatgattcttctaggcatcatgtcctatagtttgtcatccctgatgaatgtaaagttacactgttcacaaaggttttgtctcctttccactgctattagtcatggtcactctccccaaaatattatattttttctataaaaagaaaaaaatggaaaaaaattacaaggcaatggaaactattataaggccatttccttttcacattagataaattactataaagactcctaatagcttttcctgttaaggcagacccagtatgaaatggggattattatagcaaccattttggggctatatttacatgctactaaatttttataataattgaaaagattttaacaagtataaaaaattctcataggaattaaatgtagtctccctgtgtcagactgctctttcatagtataactttaaatcttttcttcaacttgagtctttgaagatagttttaattctgcttgtgacattaaaagattatttgggccagttatagcttattaggtgttgaagagaccaaggttgcaaggccaggccctgtgtgaacctttgagctttcatagagagtttcacagcatggactgtgtccccacggtcatccagtgttgtcatgcattggttagtcaaaatggggagggactagggcagtttggatagctcaacaagatacaatctcactctgtggtggtcctgctgacaaatcaagagcattgcttttgtttcttaagaaaacaaactcttttttaaaaattacttttaaatattaactcaaaagttgagattttggggtggtggtgtgccaagacattaattttttttttaaacaatgaagtgaaaaagttttacaatctctaggtttggctagttctcttaacactggttaaattaacattgcataaacacttttcaagtctgatccatatttaataatgctttaaaataaaaataaaaacaatccttttgataaatttaaaatgttacttattttaaaataaatgaagtgagatggcatggtgaggtgaaagtatcactggactaggaagaaggtgacttaggttctagataggtgtcttttaggactctgattttgaggacatcacttactatccatttcttcatgttaaaagaagtcatctcaaactcttagttttttttttttacaactatgtaatttatattccatttacataaggatacacttatttgtcaagctcagcacaatctgtaaatttttaacctatgttacaccatcttcagtgccagtcttgggcaaaattgtgcaagaggtgaagtttatatttgaatatccattctcgttttaggactcttcttccatattagtgtcatcttgcctccctaccttccacatgccccatgacttgatgcagttttaatacttgtaattcccctaaccataagatttactgctgctgtggatatctccatgaagttttcccactgagtcacatcagaaatgccctacatcttatttcctcagggctcaagagaatctgacagataccataaagggatttgacctaatcactaattttcaggtggtggctgatgctttgaacatctctttgctgcccaatccattagcgacagtaggatttttcaaacctggtatgaatagacagaaccctatccagtggaaggagaatttaataaagatagtgctgaaagaattccttaggtaatctataactaggactactcctggtaacagtaatacattccattgttttagtaaccagaaatcttcatgcaatgaaaaatactttaattcatgaagcttactttttttttttggtgtcagagtctcgctcttgtcacccaggctggaatgcagtggcgccatctcagctcactgcaacctccatctcccaggttcaagcgattctcgtgcctcggcctcctgagtagctgggattacaggcgtgtgccactacactcaactaatttttgtatttttaggagagacggggtttcaccctgttggccaggctggtctcgaactcctgacctcaagtgattcacccaccttggcctcataaacctgttttgcagaactcatttattcagcaaatatttattgagtgcctaccagatgccagtcaccacacaaggcactgggtatatggtatccccaaacaagagacataatcccggtccttaggtagtgctagtgtggtctgtaatatcttactaaggcctttggtatacgacccagagataacacgatgcgtattttagttttgcaaagaaggggtttggtctctgtgccagctctataattgttttgctacgattccactgaaactcttcgatcaagctactttatgtaaatcacttcattgttttaaaggaataaacttgattatattgtttttttatttggcataactgtgattcttttaggacaattactgtacacattaaggtgtatgtcagatattcatattgacccaaatgtgtaatattccagttttctctgcataagtaattaaaatatacttaaaaattaatagttttatctgggtacaaataaacaggtgcctgaactagttcacagacaaggaaacttctatgtaaaaatcactatgatttctgaattgctatgtgaaactacagatctttggaacactgtttaggtagggtgttaagacttacacagtacctcgtttctacacagagaaagaaatggccatacttcaggaactgcagtgcttatgaggggatatttaggcctcttgaatttttgatgtagatgggcatttttttaaggtagtggttaattacctttatgtgaactttgaatggtttaacaaaagatttgtttttgtagagattttaaagggggagaattctagaaataaatgttacctaattattacagccttaaagacaaaaatccttgttgaagtttttttaaaaaaagctaaattacatagacttaggcattaacatgtttgtggaagaatatagcagacgtatattgtatcatttgagtgaatgttcccaagtaggcattctaggctctatttaactgagtcacactgcataggaatttagaacctaacttttataggttatcaaaactgttgtcaccattgcacaattttgtcctaatatatacatagaaactttgtggggcatgttaagttacagtttgcacaagttcatctcatttgtattccattgattttttttttcttctaaacattttttcttcaaacagtatataactttttttaggggatttttttttagacagcaaaaactatctgaagatttccatttgtcaaaaagtaatgatttcttgataattgtgtagtaatgttttttagaacccagcagttaccttaaagctgaatttatatttagtaacttctgtgttaatactggatagcatgaattctgcattgagaaactgaatagctgtcataaaatgaaactttctttctaaagaaagatactcacatgagttcttgaagaatagtcataactagattaagatctgtgttttagtttaatagtttgaagtgcctgtttgggataatgataggtaatttagatgaatttaggggaaaaaaaagttatctgcagatatgttgagggcccatctctccccccacacccccacagagctaactgggttacagtgttttatccgaaagtttccaattccactgtcttgtgttttcatgttgaaaatacttttgcatttttcctttgagtgccaatttcttactagtactatttcttaatgtaacatgtttacctggaatgtattttaactatttttgtatagtgtaaactgaaacatgcacattttgtacattgtgctttcttttgtgggacatatgcagtgtgatccagttgttttccatcatttggttgcgctgacctaggaatgttggtcatatcaaacattaaaaatgaccactcttttaattgaaattaacttttaaatgtttataggagtatgtgctgtgaagtgatctaaaatttgtaatatttttgtcatgaactgtactactcctaattattgtaatgtaataaaaatagttacagtgac

SEQ ID NO: 429 - DNA, 2967 bp, Artificial Sequence
  Description of Artificial Sequence: Synthetic polynucleotide
gagctcctctgctactcagagttgcaacctcagcctcgctatggctcccagcagcccccggcccgcgctgcccgcactcctggtcctgctcggggctctgttcccaggacctggcaatgcccagacatctgtgtccccctcaaaagtcatcctgccccggggaggctccgtgctggtgacatgcagcacctcctgtgaccagcccaagttgttgggcatagagaccccgttgcctaaaaaggagttgctcctgcctgggaacaaccggaaggtgtatgaactgagcaatgtgcaagaagatagccaaccaatgtgctattcaaactgccctgatgggcagtcaacagctaaaaccttcctcaccgtgtactggactccagaacgggtggaactggcacccctcccctcttggcagccagtgggcaagaaccttaccctacgctgccaggtggagggtggggcaccccgggccaacctcaccgtggtgctgctccgtggggagaaggagctgaaacgggagccagctgtgggggagcccgctgaggtcacgaccacggtgctggtgaggagagatcaccatggagccaatttctcgtgccgcactgaactggacctgcggccccaagggctggagctgtttgagaacacctcggccccctaccagctccagacctttgtcctgccagcgactcccccacaacttgtcagcccccgggtcctagaggtggacacgcaggggaccgtggtctgttccctggacgggctgttcccagtctcggaggcccaggtccacctggcactgggggaccagaggttgaaccccacagtcacctatggcaacgactccttctcggccaaggcctcagtcagtgtgaccgcagaggacgagggcacccagcggctgacgtgtgcagtaatactggggaaccagagccaggagacactgcagacagtgaccatctacagctttccggcgcccaacgtgattctgacgaagccagaggtctcagaagggaccgaggtgacagtgaagtgtgaggcccaccctagagccaaggtgacgctgaatggggttccagcccagccactgggcccgagggcccagctcctgctgaaggccaccccagaggacaacgggcgcagcttctcctgctctgcaaccctggaggtggccggccagcttatacacaagaaccagacccgggagcttcgtgtcctgtatggcccccgactggacgagagggattgtccgggaaactggacgtggccagaaaattcccagcagactccaatgtgccaggcttgggggaacccattgcccgagctcaagtgtctaaaggatggcactttcccactgcccatcggggaatcagtgactgtcactcgagatcttgagggcacctacctctgtcgggccaggagcactcaaggggaggtcacccgcaaggtgaccgtgaatgtgctctccccccggtatgagattgtcatcatcactgtggtagcagccgcagtcataatgggcactgcaggcctcagcacgtacctctataaccgccagcggaagatcaagaaatacagactacaacaggcccaaaaagggacccccatgaaaccgaacacacaagccacgcctccctgaacctatcccgggacagggcctcttcctcggccttcccatattggtggcagtggtgccacactgaacagagtggaagacatatgccatgcagctacacctaccggccctgggacgccggaggacagggcattgtcctcagtcagatacaacagcatttggggccatggtacctgcacacctaaaacactaggccacgcatctgatctgtagtcacatgactaagccaagaggaaggagcaagactcaagacatgattgatggatgttaaagtctagcctgatgagaggggaagtggtgggggagacatagccccaccatgaggacatacaactgggaaatactgaaacttgctgcctattgggtatgctgaggccccacagacttacagaagaagtggccctccatagacatgtgtagcatcaaaacacaaaggcccacacttcctgacggatgccagcttgggcactgctgtctactgaccccaacccttgatgatatgtatttattcatttgttattttaccagctatttattgagtgtcttttatgtaggctaaatgaacataggtctctggcctcacggagctcccagtcctaatcacattcaaggtcaccaggtacagttgtacaggttgtacactgcaggagagtgcctggcaaaaagatcaaatggggctgggacttctcattggccaacctgcctttccccagaaggagtgatttttctatcggcacaaaagcactatatggactggtaatggttacaggttcagagattacccagtgaggccttattcctcccttccccccaaaactgacacctttgttagccacctccccacccacatacatttctgccagtgttcacaatgacactcagcggtcatgtctggacatgagtgcccagggaatatgcccaagctatgccttgtcctcttgtcctgtttgcatttcactgggagcttgcactatgcagctccagtttcctgcagtgatcagggtcctgcaagcagtggggaagggggccaaggtattggaggactccctcccagctttggaagcctcatccgcgtgtgtgtgtgtgtgtatgtgtagacaagctctcgctctgtcacccaggctggagtgcagtggtgcaatcatggttcactgcagtcttgaccttttgggctcaagtgatcctcccacctcagcctcctgagtagctgggaccataggctcacaacaccacacctggcaaatttgattttttttttttttccagagacggggtctcgcaacattgcccagacttcctttgtgttagttaataaagctttctcaactgcc

SEQ ID NO: 430 - DNA, 1211 bp, Artificial Sequence
  Description of Artificial Sequence: Synthetic polynucleotide
acattgttctgatcatctgaagatcagctattagaagagaaagatcagttaagtcctttggacctgatcagcttgatacaagaactactgatttcaacttctttggcttaattctctcggaaacgatgaaatatacaagttatatcttggcttttcagctctgcatcgttttgggttctcttggctgttactgccaggacccatatgtaaaagaagcagaaaaccttaagaaatattttaatgcaggtcattcagatgtagcggataatggaactcttttcttaggcattttgaagaattggaaagaggagagtgacagaaaaataatgcagagccaaattgtctccttttacttcaaactttttaaaaactttaaagatgaccagagcatccaaaagagtgtggagaccatcaaggaagacatgaatgtcaagtttttcaatagcaacaaaaagaaacgagatgacttcgaaaagctgactaattattcggtaactgacttgaatgtccaacgcaaagcaatacatgaactcatccaagtgatggctgaactgtcgccagcagctaaaacagggaagcgaaaaaggagtcagatgctgtttcgaggtcgaagagcatcccagtaatggttgtcctgcctgcaatatttgaattttaaatctaaatctatttattaatatttaacattatttatatggggaatatatttttagactcatcaatcaaataagtatttataatagcaacttttgtgtaatgaaaatgaatatctattaatatatgtattatttataattcctatatcctgtgactgtctcacttaatcctttgttttctgactaattaggcaaggctatgtgattacaaggctttatctcaggggccaactaggcagccaacctaagcaagatcccatgggttgtgtgtttatttcacttgatgatacaatgaacacttataagtgaagtgatactatccagttactgccggtttgaaaatatgcctgcaatctgagccagtgctttaatggcatgtcagacagaacttgaatgtgtcaggtgaccctgatgaaaacatagcatctcaggagatttcatgcctggtgcttccaaatattgttgacaactgtgactgtacccaaatggaaagtaactcatttgttaaaattatcaatatctaatatatatgaataaagtgtaagttcacaacta

SEQ ID NO: 431 - protein, 5 aa, Artificial Sequence
  Description of Artificial Sequence: Synthetic peptide
DYKDE

SEQ ID NO: 432 - protein, 8 aa, Artificial Sequence
  Description of Artificial Sequence: Synthetic peptide
DYKDDDDK

SEQ ID NO: 433 - protein, 8 aa, Artificial Sequence
  Description of Artificial Sequence: Synthetic peptide
GGGSGGGS

SEQ ID NO: 434 - protein, 4 aa, Artificial Sequence
  Description of Artificial Sequence: Synthetic peptide
  MOD_RES (2)..(2): K or R
  MOD_RES (3)..(3): Any amino acid
  MOD_RES (4)..(4): K or R
KXXX

SEQ ID NO: 435 - protein, 49 aa, Artificial Sequence
  Description of Artificial Sequence: Synthetic polypeptide
EEDCRVHCVREWMAGRACAERDRSYTIGRAHCSGQRFDVFRCLDHCAAP

SEQ ID NO: 436 - protein, 51 aa, Artificial Sequence
  Description of Artificial Sequence: Synthetic polypeptide
GSEEDCRVHCVREWMAGRACAERDRSYTIGRAHCSGQRFDVFRCLDHCAAP

SEQ ID NO: 437 - protein, 296 aa, Artificial Sequence
  Description of Artificial Sequence: Synthetic polypeptide
EEDCKVHCVKEWMAGKACAERDKSYTIGRAHCSGQKFDVFKCLDHCAAPGGGGSGGGGSGGGGSEPKSSDKTHTCPPCPAPELLGGPSVFLFPPKPKDTLMISRTPEVTCVVVDVSHEDPEVKFNWYVDGVEVHNAKTKPREEQYASTYRVVSVLTVLHQDWLNGKEYKCKVSNKALGAPIEKTISKAKGQPREPQVYTLPPSRDELTKNQVSLTCLVKGFYPSDIAVEWESNGQPENNYKTTPPVLDSDGSFFLYSKLTVDKSRWQQGNVFSCSVMHEALHNHYTQKSLSLSPGK

SEQ ID NO: 438 - protein, 313 aa, Artificial Sequence
  Description of Artificial Sequence: Synthetic polypeptide
EEDCKVHCVKEWMAGKACAERDKSYTIGRAHCSGQKFDVFKCLDHCAAPGGGGSGGGGSGGGGSEVQLVESGGGLVQPGGSLKLSCAASGFTFNKYAMNWVRQAPGKGLEWVARIRSKYNNYATYYADSVKDRFTISRDDSKNTAYLQMNNLKTEDTAVYYCVRHGNFGNSYISYWAYWGQGTLVTVSSGGGGSGGGGSGGGGSQTVVTQEPSLTVSPGGTVTLTCGSSTGAVTSGNYPNWVQQKPGQAPRGLIGGTKFLAPGTPARFSGSLLGGKAALTLSGVQPEDEAEYYCVLWYSNRWVFGGGTKLTVL

SEQ ID NO: 439 - protein, 308 aa, Artificial Sequence
  Description of Artificial Sequence: Synthetic polypeptide
EEDCKVHCVKEWMAGKACAERDKSYTIGRAHCSGQKFDVFKCLDHCAAPEPKSSDKTHTEVQLVESGGGLVQPGGSLKLSCAASGFTFNKYAMNWVRQAPGKGLEWVARIRSKYNNYATYYADSVKDRFTISRDDSKNTAYLQMNNLKTEDTAVYYCVRHGNFGNSYISYWAYWGQGTLVTVSSGGGGSGGGGSGGGGSQTVVTQEPSLTVSPGGTVTLTCGSSTGAVTSGNYPNWVQQKPGQAPRGLIGGTKFLAPGTPARFSGSLLGGKAALTLSGVQPEDEAEYYCVLWYSNRWVFGGGTKLTVL

SEQ ID NO: 440 - protein, 373 aa, Artificial Sequence
  Description of Artificial Sequence: Synthetic polypeptide
EEDCKVHCVKEWMAGKACAERDKSYTIGRAHCSGQKFDVFKCLDHCAAPGGGGSGGGGSGGGGSLKEAKEKAIEELKKAGITSDYYFDLINKAKTVEGVNALKDEILKAGGGGSGGGGSGGGGSEVQLVESGGGLVQPGGSLKLSCAASGFTFNKYAMNWVRQAPGKGLEWVARIRSKYNNYATYYADSVKDRFTISRDDSKNTAYLQMNNLKTEDTAVYYCVRHGNFGNSYISYWAYWGQGTLVTVSSGGGGSGGGGSGGGGSQTVVTQEPSLTVSPGGTVTLTCGSSTGAVTSGNYPNWVQQKPGQAPRGLIGGTKFLAPGTPARFSGSLLGGKAALTLSGVQPEDEAEYYCVLWYSNRWVFGGGTKLTVL

SEQ ID NO: 441 - protein, 363 aa, Artificial Sequence
  Description of Artificial Sequence: Synthetic polypeptide
EEDCKVHCVKEWMAGKACAERDKSYTIGRAHCSGQKFDVFKCLDHCAAPEPKSSDKTHTLKEAKEKAIEELKKAGITSDYYFDLINKAKTVEGVNALKDEILKAEPKSSDKTHTEVQLVESGGGLVQPGGSLKLSCAASGFTFNKYAMNWVRQAPGKGLEWVARIRSKYNNYATYYADSVKDRFTISRDDSKNTAYLQMNNLKTEDTAVYYCVRHGNFGNSYISYWAYWGQGTLVTVSSGGGGSGGGGSGGGGSQTVVTQEPSLTVSPGGTVTLTCGSSTGAVTSGNYPNWVQQKPGQAPRGLIGGTKFLAPGTPARFSGSLLGGKAALTLSGVQPEDEAEYYCVLWYSNRWVFGGGTKLTVL

SEQ ID NO: 442 - protein, 119 aa, Artificial Sequence [sequence omitted]

SEQ ID NO: 443 - protein, 110 aa, Artificial Sequence [sequence omitted]

SEQ ID NO: 444 - protein, 5 aa, Artificial Sequence
  Description of Artificial Sequence: Synthetic peptide
SFPMA

SEQ ID NO: 445 - protein, 17 aa, Artificial Sequence
  Description of Artificial Sequence: Synthetic peptide
TISTSGGRTYYRDSVKG

SEQ ID NO: 446 - protein, 10 aa, Artificial Sequence
  Description of Artificial Sequence: Synthetic peptide
FRQYSGGFDY

SEQ ID NO: 447 - protein, 13 aa, Artificial Sequence
  Description of Artificial Sequence: Synthetic peptide
TLSSGNIENNYVH

SEQ ID NO: 448 - protein, 7 aa, Artificial Sequence
  Description of Artificial Sequence: Synthetic peptide
DDDKRPD

SEQ ID NO: 449 - protein, 9 aa, Artificial Sequence
  Description of Artificial Sequence: Synthetic peptide
HSYVSSFNV

SEQ ID NO: 450 - protein, 244 aa, Artificial Sequence
  Description of Artificial Sequence: Synthetic polypeptide
EVQLLESGGGLVQPGGSLRLSCAASGFTFSSFPMAWVRQAPGKGLEWVSTISTSGGRTYYRDSVKGRFTISRDNSKNTLYLQMNSLRAEDTAVYYCAKFRQYSGGFDYWGQGTLVTVSSGGGGSGGGGSGGGGSDIQLTQPNSVSTSLGSTVKLSCTLSSGNIENNYVHWYQLYEGRSPTTMIYDDDKRPDGVPDRFSGSIDRSSNSAFLTIHNVAIEDEAIYFCHSYVSSFNVFGGGTKLTVL

SEQ ID NO: 451 - protein, 244 aa, Artificial Sequence
  Description of Artificial Sequence: Synthetic polypeptide
DIQLTQPNSVSTSLGSTVKLSCTLSSGNIENNYVHWYQLYEGRSPTTMIYDDDKRPDGVPDRFSGSIDRSSNSAFLTIHNVAIEDEAIYFCHSYVSSFNVFGGGTKLTVLGGGGSGGGGSGGGGSEVQLLESGGGLVQPGGSLRLSCAASGFTFSSFPMAWVRQAPGKGLEWVSTISTSGGRTYYRDSVKGRFTISRDNSKNTLYLQMNSLRAEDTAVYYCAKFRQYSGGFDYWGQGTLVTVSS

SEQ ID NO: 452 - protein, 118 aa, Artificial Sequence [sequence omitted]

SEQ ID NO: 453 - protein, 108 aa, Artificial Sequence [sequence omitted]

SEQ ID NO: 454 - protein, 5 aa, Artificial Sequence
  Description of Artificial Sequence: Synthetic peptide
GYGMH

SEQ ID NO: 455 - protein, 17 aa, Artificial Sequence
  Description of Artificial Sequence: Synthetic peptide
VIWYDGSKKYYVDSVKG

SEQ ID NO: 456 - protein, 9 aa, Artificial Sequence
  Description of Artificial Sequence: Synthetic peptide
QMGYWHFDL

SEQ ID NO: 457 - protein, 11 aa, Artificial Sequence
  Description of Artificial Sequence: Synthetic peptide
RASQSVSSYLA

SEQ ID NO: 458 - protein, 7 aa, Artificial Sequence
  Description of Artificial Sequence: Synthetic peptide
DASNRAT

SEQ ID NO: 459 - protein, 10 aa, Artificial Sequence
  Description of Artificial Sequence: Synthetic peptide
QQRSNWPPLT

SEQ ID NO: 460 - protein, 241 aa, Artificial Sequence
  Description of Artificial Sequence: Synthetic polypeptide
QVQLVESGGGVVQPGRSLRLSCAASGFKFSGYGMHWVRQAPGKGLEWVAVIWYDGSKKYYVDSVKGRFTISRDNSKNTLYLQMNSLRAEDTAVYYCARQMGYWHFDLWGRGTLVTVSSGGGGSGGGGSGGGGSEIVLTQSPATLSLSPGERATLSCRASQSVSSYLAWYQQKPGQAPRLLIYDASNRATGIPARFSGSGSGTDFTLTISSLEPEDFAVYYCQQRSNWPPLTFGGGTKVEIK

SEQ ID NO: 461 - protein, 241 aa, Artificial Sequence
  Description of Artificial Sequence: Synthetic polypeptide
EIVLTQSPATLSLSPGERATLSCRASQSVSSYLAWYQQKPGQAPRLLIYDASNRATGIPARFSGSGSGTDFTLTISSLEPEDFAVYYCQQRSNWPPLTFGGGTKVEIKGGGGSGGGGSGGGGSQVQLVESGGGVVQPGRSLRLSCAASGFKFSGYGMHWVRQAPGKGLEWVAVIWYDGSKKYYVDSVKGRFTISRDNSKNTLYLQMNSLRAEDTAVYYCARQMGYWHFDLWGRGTLVTVSS

SEQ ID NO: 462 - protein, 119 aa, Artificial Sequence [sequence omitted]

SEQ ID NO: 463 - protein, 105 aa, Artificial Sequence
  Description of Artificial Sequence: Synthetic polypeptide
DIQMTQSPSSLSASVGDRVTITCSASSSVSYMNWYQQTPGKAPKRWIYDTSKLASGVPSRFSGSGSGTDYTFTISSLQPEDIATYYCQQWSSNPFTFGQGTKLQI

SEQ ID NO: 464 - protein, 5 aa, Artificial Sequence
  Description of Artificial Sequence: Synthetic peptide
RYTMH

SEQ ID NO: 465 - protein, 17 aa, Artificial Sequence
  Description of Artificial Sequence: Synthetic peptide
YINPSRGYTNYNQKVKD

SEQ ID NO: 466 - protein, 10 aa, Artificial Sequence
  Description of Artificial Sequence: Synthetic peptide
YYDDHYCLDY

SEQ ID NO: 467 - protein, 10 aa, Artificial Sequence
  Description of Artificial Sequence: Synthetic peptide
SASSSVSYMN

SEQ ID NO: 468 - protein, 7 aa, Artificial Sequence
  Description of Artificial Sequence: Synthetic peptide
DTSKLAS

SEQ ID NO: 469 - protein, 9 aa, Artificial Sequence
  Description of Artificial Sequence: Synthetic peptide
QQWSSNPFT

SEQ ID NO: 470 - protein, 239 aa, Artificial Sequence
  Description of Artificial Sequence: Synthetic polypeptide
QVQLVQSGGGVVQPGRSLRLSCKASGYTFTRYTMHWVRQAPGKGLEWIGYINPSRGYTNYNQKVKDRFTISRDNSKNTAFLQMDSLRPEDTGVYFCARYYDDHYCLDYWGQGTPVTVSSGGGGSGGGGSGGGGSDIQMTQSPSSLSASVGDRVTITCSASSSVSYMNWYQQTPGKAPKRWIYDTSKLASGVPSRFSGSGSGTDYTFTISSLQPEDIATYYCQQWSSNPFTFGQGTKLQI

SEQ ID NO: 471 - protein, 239 aa, Artificial Sequence
  Description of Artificial Sequence: Synthetic polypeptide
DIQMTQSPSSLSASVGDRVTITCSASSSVSYMNWYQQTPGKAPKRWIYDTSKLASGVPSRFSGSGSGTDYTFTISSLQPEDIATYYCQQWSSNPFTFGQGTKLQIGGGGSGGGGSGGGGSQVQLVQSGGGVVQPGRSLRLSCKASGYTFTRYTMHWVRQAPGKGLEWIGYINPSRGYTNYNQKVKDRFTISRDNSKNTAFLQMDSLRPEDTGVYFCARYYDDHYCLDYWGQGTPVTVSS

SEQ ID NO: 472 - protein, 120 aa, Artificial Sequence
  Description of Artificial Sequence: Synthetic polypeptide
QVQLVQSGAEVKKPGASVKVSCKASGYTFTSYYIHWVRQAPGQGLEWIGCIYPGNVNTNYNEKFKDRATLTVDTSISTAYMELSRLRSDDTAVYFCTRSHYGLDWNFDVWGQGTTVTVSS

SEQ ID NO: 473 - protein, 107 aa, Artificial Sequence
  Description of Artificial Sequence: Synthetic polypeptide
DIQMTQSPSSLSASVGDRVTITCHASQNIYVWLNWYQQKPGKAPKLLIYKASNLHTGVPSRFSGSGSGTDFTLTISSLQPEDFATYYCQQGQTYPYTFGGGTKVEIK

SEQ ID NO: 474 - protein, 5 aa, Artificial Sequence
  Description of Artificial Sequence: Synthetic peptide
SYYIH

SEQ ID NO: 475 - protein, 17 aa, Artificial Sequence
  Description of Artificial Sequence: Synthetic peptide
CIYPGNVNTNYNEKFKD

SEQ ID NO: 476 - protein, 11 aa, Artificial Sequence
  Description of Artificial Sequence: Synthetic peptide
SHYGLDWNFDV

SEQ ID NO: 477 - protein, 11 aa, Artificial Sequence
  Description of Artificial Sequence: Synthetic peptide
HASQNIYVWLN

SEQ ID NO: 478 - protein, 7 aa, Artificial Sequence
  Description of Artificial Sequence: Synthetic peptide
KASNLHT

SEQ ID NO: 479 - protein, 9 aa, Artificial Sequence
  Description of Artificial Sequence: Synthetic peptide
QQGQTYPYT

SEQ ID NO: 480 - protein, 242 aa, Artificial Sequence
  Description of Artificial Sequence: Synthetic polypeptide
QVQLVQSGAEVKKPGASVKVSCKASGYTFTSYYIHWVRQAPGQGLEWIGCIYPGNVNTNYNEKFKDRATLTVDTSISTAYMELSRLRSDDTAVYFCTRSHYGLDWNFDVWGQGTTVTVSSGGGGSGGGGSGGGGSDIQMTQSPSSLSASVGDRVTITCHASQNIYVWLNWYQQKPGKAPKLLIYKASNLHTGVPSRFSGSGSGTDFTLTISSLQPEDFATYYCQQGQTYPYTFGGGTKVEIK

SEQ ID NO: 481 - protein, 242 aa, Artificial Sequence
  Description of Artificial Sequence: Synthetic polypeptide
DIQMTQSPSSLSASVGDRVTITCHASQNIYVWLNWYQQKPGKAPKLLIYKASNLHTGVPSRFSGSGSGTDFTLTISSLQPEDFATYYCQQGQTYPYTFGGGTKVEIKGGGGSGGGGSGGGGSQVQLVQSGAEVKKPGASVKVSCKASGYTFTSYYIHWVRQAPGQGLEWIGCIYPGNVNTNYNEKFKDRATLTVDTSISTAYMELSRLRSDDTAVYFCTRSHYGLDWNFDVWGQGTTVTVSS

SEQ ID NO: 482 - protein, 116 aa, Artificial Sequence
  Description of Artificial Sequence: Synthetic polypeptide
QVQLVQSGAEVKKPGSSVKVSCKASGYTFTSYRMHWVRQAPGQGLEWIGYINPSTGYTEYNQKFKDKATITADESTNTAYMELSSLRSEDTAVYYCARGGGVFDYWGQGTLVTVSS

SEQ ID NO: 483 - protein, 106 aa, Artificial Sequence
  Description of Artificial Sequence: Synthetic polypeptide
DIQMTQSPSTLSASVGDRVTITCSASSSISYMHWYQQKPGKAPKLLIYTTSNLASGVPARFSGSGSGTEFTLTISSLQPDDFATYYCHQRSTYPLTFGQGTKVEVK

SEQ ID NO: 484 - protein, 5 aa, Artificial Sequence
  Description of Artificial Sequence: Synthetic peptide
SYRMH

SEQ ID NO: 485 - protein, 17 aa, Artificial Sequence
  Description of Artificial Sequence: Synthetic peptide
YINPSTGYTEYNQKFKD

SEQ ID NO: 486 - protein, 7 aa, Artificial Sequence
  Description of Artificial Sequence: Synthetic peptide
GGGVFDY

SEQ ID NO: 487 - protein, 10 aa, Artificial Sequence
  Description of Artificial Sequence: Synthetic peptide
SASSSISYMH

SEQ ID NO: 488 - protein, 7 aa, Artificial Sequence
  Description of Artificial Sequence: Synthetic peptide
TTSNLAS

SEQ ID NO: 489 - protein, 9 aa, Artificial Sequence
  Description of Artificial Sequence: Synthetic peptide
HQRSTYPLT

SEQ ID NO: 490 - protein, 237 aa, Artificial Sequence
  Description of Artificial Sequence: Synthetic polypeptide
QVQLVQSGAEVKKPGSSVKVSCKASGYTFTSYRMHWVRQAPGQGLEWIGYINPSTGYTEYNQKFKDKATITADESTNTAYMELSSLRSEDTAVYYCARGGGVFDYWGQGTLVTVSSGGGGSGGGGSGGGGSDIQMTQSPSTLSASVGDRVTITCSASSSISYMHWYQQKPGKAPKLLIYTTSNLASGVPARFSGSGSGTEFTLTISSLQPDDFATYYCHQRSTYPLTFGQGTKVEVK

SEQ ID NO: 491 - protein, 237 aa, Artificial Sequence
  Description of Artificial Sequence: Synthetic polypeptide
DIQMTQSPSTLSASVGDRVTITCSASSSISYMHWYQQKPGKAPKLLIYTTSNLASGVPARFSGSGSGTEFTLTISSLQPDDFATYYCHQRSTYPLTFGQGTKVEVKGGGGSGGGGSGGGGSQVQLVQSGAEVKKPGSSVKVSCKASGYTFTSYRMHWVRQAPGQGLEWIGYINPSTGYTEYNQKFKDKATITADESTNTAYMELSSLRSEDTAVYYCARGGGVFDYWGQGTLVTVSS

SEQ ID NO: 492 - DNA, 20 bp, Artificial Sequence
  Description of Artificial Sequence: Synthetic oligonucleotide
gttggtacataacgttttga

SEQ ID NO: 493 - DNA, 20 bp, Artificial Sequence
  Description of Artificial Sequence: Synthetic oligonucleotide
tgaattccaggataacctga

SEQ ID NO: 494 - DNA, 20 bp, Artificial Sequence
  Description of Artificial Sequence: Synthetic oligonucleotide
cccgaacactaagtgttaat

SEQ ID NO: 495 - DNA, 20 bp, Artificial Sequence
  Description of Artificial Sequence: Synthetic oligonucleotide
accatgtacatgaattcaag

SEQ ID NO: 496 - DNA, 20 bp, Artificial Sequence
  Description of Artificial Sequence: Synthetic oligonucleotide
aatcttctcgagtttcgtat

SEQ ID NO: 497 - DNA, 20 bp, Artificial Sequence
  Description of Artificial Sequence: Synthetic oligonucleotide
tataggaattagagcgcttg

SEQ ID NO: 498 - DNA, 20 bp, Artificial Sequence
  Description of Artificial Sequence: Synthetic oligonucleotide
aaagaaggcttcttctctag

SEQ ID NO: 499 - DNA, 20 bp, Artificial Sequence
  Description of Artificial Sequence: Synthetic oligonucleotide
ggcttcagccattatgtata

SEQ ID NO: 500 - DNA, 20 bp, Artificial Sequence
  Description of Artificial Sequence: Synthetic oligonucleotide
gggatacattataagcttgc

SEQ ID NO: 501 - DNA, 20 bp, Artificial Sequence
  Description of Artificial Sequence: Synthetic oligonucleotide
ttgatttgagaatgttcagc

SEQ ID NO: 502 - DNA, 20 bp, Artificial Sequence
  Description of Artificial Sequence: Synthetic oligonucleotide
gcttgggtattttttgatca

SEQ ID NO: 503 - DNA, 20 bp, Artificial Sequence
  Description of Artificial Sequence: Synthetic oligonucleotide
tccatgggattctttacgat

SEQ ID NO: 504 - DNA, 20 bp, Artificial Sequence
  Description of Artificial Sequence: Synthetic oligonucleotide
tggggttaaatgaattcatc

SEQ ID NO: 505 - DNA, 20 bp, Artificial Sequence
  Description of Artificial Sequence: Synthetic oligonucleotide
cttgtttatgtaaacgcgac

SEQ ID NO: 506 - DNA, 20 bp, Artificial Sequence
  Description of Artificial Sequence: Synthetic oligonucleotide
tgggttacttaaagaagtgg

SEQ ID NO: 507 - DNA, 20 bp, Artificial Sequence
  Description of Artificial Sequence: Synthetic oligonucleotide
ccaattgtgttttgaattcc

SEQ ID NO: 508 - DNA, 20 bp, Artificial Sequence
  Description of Artificial Sequence: Synthetic oligonucleotide
caaaacgtttttcatggttc

SEQ ID NO: 509 - DNA, 20 bp, Artificial Sequence
  Description of Artificial Sequence: Synthetic oligonucleotide
ttgatatctgtagggaaggt

SEQ ID NO: 510 - DNA, 20 bp, Artificial Sequence
  Description of Artificial Sequence: Synthetic oligonucleotide
taaagttagcattcatgcag

SEQ ID NO: 511 - DNA, 20 bp, Artificial Sequence
  Description of Artificial Sequence: Synthetic oligonucleotide
taaaaggcctaattctcctc

SEQ ID NO: 512 - DNA, 20 bp, Artificial Sequence
  Description of Artificial Sequence: Synthetic oligonucleotide
cggccatttttaattctttc

SEQ ID NO: 513 - DNA, 20 bp, Artificial Sequence
  Description of Artificial Sequence: Synthetic oligonucleotide
gacagctgtttatgtttaga

SEQ ID NO: 514 - DNA, 20 bp, Artificial Sequence
  Description of Artificial Sequence: Synthetic oligonucleotide
ctgagtatatggtgaaccat

SEQ ID NO: 515 - DNA, 20 bp, Artificial Sequence
  Description of Artificial Sequence: Synthetic oligonucleotide
gtgaaatgatttgtcgagaa

SEQ ID NO: 516 - DNA, 20 bp, Artificial Sequence
  Description of Artificial Sequence: Synthetic oligonucleotide
agcatatgcaactaggtttt

SEQ ID NO: 517 - DNA, 20 bp, Artificial Sequence
  Description of Artificial Sequence: Synthetic oligonucleotide
gtgaattctgatgaagagct

SEQ ID NO: 518 - DNA, 20 bp, Artificial Sequence
  Description of Artificial Sequence: Synthetic oligonucleotide
tgtgctactagtagatggag

SEQ ID NO: 519 - DNA, 20 bp, Artificial Sequence
  Description of Artificial Sequence: Synthetic oligonucleotide
catcttcacttcctgggaag

SEQ ID NO: 520 - DNA, 20 bp, Artificial Sequence
  Description of Artificial Sequence: Synthetic oligonucleotide
tttccggttatataaccagg

SEQ ID NO: 521 - DNA, 20 bp, Artificial Sequence
  Description of Artificial Sequence: Synthetic oligonucleotide
gtattgtgcacaactgtttg

SEQ ID NO: 522 - DNA, 20 bp, Artificial Sequence
  Description of Artificial Sequence: Synthetic oligonucleotide
atctgatgcatctttcttcc

SEQ ID NO: 523 - DNA, 20 bp, Artificial Sequence
  Description of Artificial Sequence: Synthetic oligonucleotide
gtgcacttttctttaaacag

SEQ ID NO: 524 - DNA, 20 bp, Artificial Sequence
  Description of Artificial Sequence: Synthetic oligonucleotide
tttcatgatagactgcagtc

SEQ ID NO: 525 - DNA, 20 bp, Artificial Sequence
  Description of Artificial Sequence: Synthetic oligonucleotide
tccatggtggcatatagttt

SEQ ID NO: 526 - DNA, 20 bp, Artificial Sequence
  Description of Artificial Sequence: Synthetic oligonucleotide
ctttgaaaaatttgcacgtg

SEQ ID NO: 527 - DNA, 20 bp, Artificial Sequence
  Description of Artificial Sequence: Synthetic oligonucleotide
ttttgtaaggcttgttgaga

SEQ ID NO: 528 - DNA, 20 bp, Artificial Sequence
  Description of Artificial Sequence: Synthetic oligonucleotide
gaggtttgaattcaagtctg

SEQ ID NO: 529 - DNA, 20 bp, Artificial Sequence
  Description of Artificial Sequence: Synthetic oligonucleotide
gtcttttaggctacgaaaga

SEQ ID NO: 530 - DNA, 20 bp, Artificial Sequence
  Description of Artificial Sequence: Synthetic oligonucleotide
tagaaaattttctggagcac

SEQ ID NO: 531 - DNA, 20 bp, Artificial Sequence
  Description of Artificial Sequence: Synthetic oligonucleotide
tacaacagttgagggttttt

SEQ ID NO: 532 - RNA, 21 nt, Artificial Sequence
  Description of Artificial Sequence: Synthetic oligonucleotide
aagcuauggccagaguuacua

SEQ ID NO: 533 - RNA, 21 nt, Artificial Sequence
  Description of Artificial Sequence: Synthetic oligonucleotide
aauaguaacucuggccauagc

SEQ ID NO: 534 - RNA, 21 nt, Artificial Sequence
  Description of Artificial Sequence: Synthetic oligonucleotide
aaucugcugcuucaucugcug

SEQ ID NO: 535 - RNA, 21 nt, Artificial Sequence
  Description of Artificial Sequence: Synthetic oligonucleotide
aacagcagaugaagcagcaga

SEQ ID NO: 536 - RNA, 21 nt, Artificial Sequence
  Description of Artificial Sequence: Synthetic oligonucleotide
aagaaccuagaugccuggauu

SEQ ID NO: 537 - RNA, 21 nt, Artificial Sequence
  Description of Artificial Sequence: Synthetic oligonucleotide
aaaauccaggcaucuagguuc

SEQ ID NO: 538 - RNA, 21 nt, Artificial Sequence
  Description of Artificial Sequence: Synthetic oligonucleotide
aaggcuucuucucuaguaaca

SEQ ID NO: 539 - RNA, 21 nt, Artificial Sequence
  Description of Artificial Sequence: Synthetic oligonucleotide
aauguuacuagagaagaagcc

SEQ ID NO: 540 - RNA, 21 nt, Artificial Sequence
  Description of Artificial Sequence: Synthetic oligonucleotide
aaucuaucuucaguagcuugu

SEQ ID NO: 541 - RNA, 21 nt, Artificial Sequence
  Description of Artificial Sequence: Synthetic oligonucleotide
aaacaagcuacugaagauaga

SEQ ID NO: 542 - RNA, 21 nt, Artificial Sequence
  Description of Artificial Sequence: Synthetic oligonucleotide
aauaaguggcaucacgaggua

SEQ ID NO: 543 - RNA, 21 nt, Artificial Sequence
  Description of Artificial Sequence: Synthetic oligonucleotide
aauaccucgugaugccacuua

SEQ ID NO: 544 - RNA, 21 nt, Artificial Sequence
  Description of Artificial Sequence: Synthetic oligonucleotide
aagucugguagauggcaaccu

SEQ ID NO: 545 - RNA, 21 nt, Artificial Sequence
  Description of Artificial Sequence: Synthetic oligonucleotide
aaagguugccaucuaccagac

SEQ ID NO: 546 - DNA, 10083 bp, Artificial Sequence
  Description of Artificial Sequence: Synthetic polynucleotide
ctgcggggcgctgttgctgtggctgagatttggccgccgcctcccccacccggcctgcgccctccctctccctcggcgcccgcccgcccgctcgcggcccgcgctcgctcctctccctcgcagccggcagggcccccgacccccgtccgggccctcgccggcccggccgcccgtgcccggggctgttttcgcgagcaggtgaaaatggctgagaacttgctggacggaccgcccaaccccaaaagagccaaactcagctcgcccggtttctcggcgaatgacagcacagattttggatcattgtttgacttggaaaatgatcttcctgatgagctgatacccaatggaggagaattaggccttttaaacagtgggaaccttgttccagatgctgcttccaaacataaacaactgtcggagcttctacgaggaggcagcggctctagtatcaacccaggaataggaaatgtgagcgccagcagccccgtgcagcagggcctgggtggccaggctcaagggcagccgaacagtgctaacatggccagcctcagtgccatgggcaagagccctctgagccagggagattcttcagcccccagcctgcctaaacaggcagccagcacctctgggcccacccccgctgcctcccaagcactgaatccgcaagcacaaaagcaagtggggctggcgactagcagccctgccacgtcacagactggacctggtatctgcatgaatgctaactttaaccagacccacccaggcctcctcaatagtaactctggccatagcttaattaatcaggcttcacaagggcaggcgcaagtcatgaatggatctcttggggctgctggcagaggaaggggagctggaatgccgtaccctactccagccatgcagggcgcctcgagcagcgtgctggctgagaccctaacgcaggtttccccgcaaatgactggtcacgcgggactgaacaccgcacaggcaggaggcatggccaagatgggaataactgggaacacaagtccatttggacagccctttagtcaagctggagggcagccaatgggagccactggagtgaacccccagttagccagcaaacagagcatggtcaacagtttgcccaccttccctacagatatcaagaatacttcagtcaccaacgtgccaaatatgtctcagatgcaaacatcagtgggaattgtacccacacaagcaattgcaacaggccccactgcagatcctgaaaaacgcaaactgatacagcagcagctggttctactgcttcatgctcataagtgtcagagacgagagcaagcaaacggagaggttcgggcctgctcgctcccgcattgtcgaaccatgaaaaacgttttgaatcacatgacgcattgtcaggctgggaaagcctgccaagccatcctggggtctccagctagtggaattcaaaacacaattggttctgttggcacagggcaacagaatgccacttctttaagtaacccaaatcccatagaccccagctccatgcagcgagcctatgctgctctcggactcccctacatgaaccagccccagacgcagctgcagcctcaggttcctggccagcaaccagcacagcctcaaacccaccagcagatgaggactctcaaccccctgggaaataatccaatgaacattccagcaggaggaataacaacagatcagcagcccccaaacttgatttcagaatcagctcttccgacttccctgggggccacaaacccactgatgaacgatggctccaactctggtaacattggaaccctcagcactataccaacagcagctcctccttctagcaccggtgtaaggaaaggctggcacgaacatgtcactcaggacctgcggagccatctagtgcataaactcgtccaagccatcttcccaacacctgatcccgcagctctaaaggatcgccgcatggaaaacctggtagcctatgctaagaaagtggaaggggacatgtacgagtctgccaacagcagggatgaatattatcacttattagcagagaaaatctacaagatacaaaaagaactagaagaaaaacggaggtcgcgtttacataaacaaggcatcttggggaaccagccagccttaccagccccgggggctcagccccctgtgattccacaggcacaacctgtgagacctccaaatggacccctgtccctgccagtgaatcgcatgcaagtttctcaagggatgaattcatttaaccccatgtccttggggaacgtccagttgccacaagcacccatgggacctcgtgcagcctccccaatgaaccactctgtccagatgaacagcatgggctcagtgccagggatggccatttctccttcccgaatgcctcagcctccgaacatgatgggtgcacacaccaacaacatgatggcccaggcgcccgctcagagccagtttctgccacagaaccagttcccgtcatccagcggggcgatgagtgtgggcatggggcagccgccagcccaaacaggcgtgtcacagggacaggtgcctggtgctgctcttcctaaccctctcaacatgctggggcctcaggccagccagctaccttgccctccagtgacacagtcaccactgcacccaacaccgcctcctgcttccacggctgctggcatgccatctctccagcacacgacaccacctgggatgactcctccccagccagcagctcccactcagccatcaactcctgtgtcgtcttccgggcagactcccaccccgactcctggctcagtgcccagtgctacccaaacccagagcacccctacagtccaggcagcagcccaggcccaggtgaccccgcagcctcaaaccccagttcagcccccgtctgtggctacccctcagtcatcgcagcaacagccgacgcctgtgcacgcccagcctcctggcacaccgctttcccaggcagcagccagcattgataacagagtccctaccccctcctcggtggccagcgcagaaaccaattcccagcagccaggacctgacgtacctgtgctggaaatgaagacggagacccaagcagaggacactgagcccgatcctggtgaatccaaaggggagcccaggtctgagatgatggaggaggatttgcaaggagcttcccaagttaaagaagaaacagacatagcagagcagaaatcagaaccaatggaagtggatgaaaagaaacctgaagtgaaagtagaagttaaagaggaagaagagagtagcagtaacggcacagcctctcagtcaacatctccttcgcagccgcgcaaaaaaatctttaaaccagaggagttacgccaggccctcatgccaaccctagaagcactgtatcgacaggacccagagtcattacctttccggcagcctgtagatccccagctcctcggaattccagactattttgacatcgtaaagaatcccatggacctctccaccatcaagcggaagctggacacagggcaataccaagagccctggcagtacgtggacgacgtctggctcatgttcaacaatgcctggctctataatcgcaagacatcccgagtctataagttttgcagtaagcttgcagaggtctttgagcaggaaattgaccctgtcatgcagtcccttggatattgctgtggacgcaagtatgagttttccccacagactttgtgctgctatgggaagcagctgtgtaccattcctcgcgatgctgcctactacagctatcagaataggtatcatttctgtgagaagtgtttcacagagatccagggcgagaatgtgaccctgggtgacgacccttcacagccccagacgacaatttcaaaggatcagtttgaaaagaagaaaaatgataccttagaccccgaacctttcgttgattgcaaggagtgtggccggaagatgcatcagatttgcgttctgcactatgacatcatttggccttcaggttttgtgtgcgacaactgcttgaagaaaactggcagacctcgaaaagaaaacaaattcagtgctaagaggctgcagaccacaagactgggaaaccacttggaagaccgagtgaacaaatttttgcggcgccagaatcaccctgaagccggggaggtttttgtccgagtggtggccagctcagacaagacggtggaggtcaagcccgggatgaagtcacggtttgtggattctggggaaatgtctgaatctttcccatatcgaaccaaagctctgtttgcttttgaggaaattgacggcgtggatgtctgcttttttggaatgcacgtccaagaatacggctctgattgcccccctccaaacacgaggcgtgtgtacatttcttatctggatagtattcatttcttccggccacgttgcctccgcacagccgtttaccatgagatccttattggatatttagagtatgtgaagaaattagggtatgtgacagggcacatctgggcctgtcctccaagtgaaggagatgattacatcttccattgccacccacctgatcaaaaaatacccaagccaaaacgactgcaggagtggtacaaaaagatgctggacaaggcgtttgcagagcggatcatccatgactacaaggatattttcaaacaagcaactgaagacaggctcaccagtgccaaggaactgccctattttgaaggtgatttctggcccaatgtgttagaagagagcattaaggaactagaacaagaagaagaggagaggaaaaaggaagagagcactgcagccagtgaaaccactgagggcagtcagggcgacagcaagaatgccaagaagaagaacaacaagaaaaccaacaagaacaaaagcagcatcagccgcgccaacaagaagaagcccagcatgcccaacgtgtccaatgacctgtcccagaagctgtatgccaccatggagaagcacaaggaggtcttcttcgtgatccacctgcacgctgggcctgtcatcaacaccctgccccccatcgtcgaccccgaccccctgctcagctgtgacctcatggatgggcgcgacgccttcctcaccctcgccagagacaagcactgggagttctcctccttgcgccgctccaagtggtccacgctctgcatgctggtggagctgcacacccagggccaggaccgctttgtctacacctgcaacgagtgcaagcaccacgtggagacgcgctggcactgcactgtgtgcgaggactacgacctctgcatcaactgctataacacgaagagccatgcccataagatggtgaagtgggggctgggcctggatgacgagggcagcagccagggcgagccacagtcaaagagcccccaggagtcacgccggctgagcatccagcgctgcatccagtcgctggtgcacgcgtgccagtgccgcaacgccaactgctcgctgccatcctgccagaagatgaagcgggtggtgcagcacaccaagggctgcaaacgcaagaccaacgggggctgcccggtgtgcaagcagctcatcgccctctgctgctaccacgccaagcactgccaagaaaacaaatgccccgtgcccttctgcctcaacatcaaacacaagctccgccagcagcagatccagcaccgcctgcagcaggcccagctcatgcgccggcggatggccaccatgaacacccgcaacgtgcctcagcagagtctgccttctcctacctcagcaccgcccgggacccccacacagcagcccagcacaccccagacgccgcagccccctgcccagccccaaccctcacccgtgagcatgtcaccagctggcttccccagcgtggcccggactcagccccccaccacggtgtccacagggaagcctaccagccaggtgccggcccccccacccccggcccagccccctcctgcagcggtggaagcggctcggcagatcgagcgtgaggcccagcagcagcagcacctgtaccgggtgaacatcaacaacagcatgcccccaggacgcacgggcatggggaccccggggagccagatggcccccgtgagcctgaatgtgccccgacccaaccaggtgagcgggcccgtcatgcccagcatgcctcccgggcagtggcagcaggcgccccttccccagcagcagcccatgccaggcttgcccaggcctgtgatatccatgcaggcccaggcggccgtggctgggccccggatgcccagcgtgcagccacccaggagcatctcacccagcgctctgcaagacctgctgcggaccctgaagtcgcccagctcccctcagcagcaacagcaggtgctgaacattctcaaatcaaacccgcagctaatggcagctttcatcaaacagcgcacagccaagtacgtggccaatcagcccggcatgcagccccagcctggcctccagtcccagcccggcatgcaaccccagcctggcatgcaccagcagcccagcctgcagaacctgaatgccatgcaggctggcgtgccgcggcccggtgtgcctccacagcagcaggcgatgggaggcctgaacccccagggccaggccttgaacatcatgaacccaggacacaaccccaacatggcgagtatgaatccacagtaccgagaaatgttacggaggcagctgctgcagcagcagcagcaacagcagcagcaacaacagcagcaacagcagcagcagcaagggagtgccggcatggctgggggcatggcggggcacggccagttccagcagcctcaaggacccggaggctacccaccggccatgcagcagcagcagcgcatgcagcagcatctccccctccagggcagctccatgggccagatggcggctcagatgggacagcttggccagatggggcagccggggctgggggcagacagcacccccaacatccagcaagccctgcagcagcggattctgcagcaacagcagatgaagcagcagattgggtccccaggccagccgaaccccatgagcccccagcaacacatgctctcaggacagccacaggcctcgcatctccctggccagcagatcgccacgtcccttagtaaccaggtgcggtctccagcccctgtccagtctccacggccccagtcccagcctccacattccagcccgtcaccacggatacagccccagccttcgccacaccacgtctcaccccagactggttccccccaccccggactcgcagtcaccatggccagctccatagatcagggacacttggggaaccccgaacagagtgcaatgctcccccagctgaacacccccagcaggagtgcgctgtccagcgaactgtccctggtcggggacaccacgggggacacgctagagaagtttgtggagggcttgtagcattgtgagagcatcaccttttccctttcatgttcttggaccttttgtactgaaaatccaggcatctaggttctttttattcctagatggaactgcgacttccgagccatggaagggtggattgatgtttaaagaaacaatacaaagaatatatttttttgttaaaaaccagttgatttaaatatctggtctctctctttggtttttttttggcgggggggtggggggggttcttttttttccgttttgtttttgtttggggggaggggggttttgtttggattctttttgtcgtcattgctggtgactcatgcctttttttaacgggaaaaacaagttcattatattcatattttttatttgtattttcaagactttaaacatttatgtttaaaagtaagaagaaaaataatattcagaactgattcctgaaataatgcaagcttataatgtatcccgataactttgtgatgtttcgggaagatttttttctatagtgaactctgtgggcgtctcccagtattaccctggatgataggaattgactccggcgtgcacacacgtacacacccacacacatctatctatacataatggctgaagccaaacttgtcttgcagatgtagaaattgttgctttgtttctctgataaaactggttttagacaaaaaatagggatgatcactcttagaccatgctaatgttactagagaagaagccttcttttctttcttctatgtgaaacttgaaatgaggaaaagcaattctagtgtaaatcatgcaagcgctctaattcctataaatacgaaactcgagaagattcaatcactgtatagaatggtaaaataccaactcatttcttatatcatattgttaaataaactgtgtgcaacagacaaaaagggtggtccttcttgaattcatgtacatggtattaacacttagtgttcggggttttttgttatgaaaatgctgttttcaacattgtatttggactatgcatgtgttttttccccattgtatataaagtaccgcttaaaattgatataaattactgaggtttttaacatgtattctgttctttaagatccctgtaagaatgtttaaggtttttatttatttatatatattttttgagtctgttctttgtaagacatggttctggttgttcgctcatagcggagaggctggggctgcggttgtggttgtggcggcgtgggtggtggctgggaactgtggcccaggcttagcggccgcccggaggcttttcttcccggagactgaggtgggcgactgaggtgggcggctcagcgttggccccacacattcgaggctcacaggtgattgtcgctcacacagttagggtcgtcagttggtctgaaactgcatttggcccactcctccatcctccctgtccgtcgtagctgccacccccagaggcggcgcttcttcccgtgttcaggcggctccccccccccgtacacgactcccagaatctgaggcagagagtgctccaggctcgcgaggtgctttctgacttccccccaaatcctgccgctgccgcgcagcatgtcccgtgtggcgtttgaggaaatgctgagggacagacaccttggagcaccagctccggtccctgttacagtgagaaaggtcccccacttcgggggatacttgcacttagccacatggtcctgcctcccttggagtccagttccaggctcccttactgagtgggtgagacaagttcacaaaaaccgtaaaactgagaggaggaccatgggcaggggagctgaagttcatcccctaagtctaccacccccagcacccagagaacccactttatccctagtcccccaacaaaggctggtctaggtgggggtgatggtaattttagaaatcacgccccaaatagcttccgtttgggcccttacattcacagataggttttaaatagctgaatacttggtttgggaatctgaattcgaggaacctttctaagaagttggaaaggtccgatctagttttagcacagagctttgaaccttgagttataaaatgcagaataattcaagtaaaaataagaccaccatctggcacccctgaccagcccccattcaccccatcccaggaggggaagcacaggccgggcctccggtggagattgctgccactgctcggcctgctgggttcttaacctccagtgtcctcttcatcttttccacccgtagggaaaccttgagccatgtgttcaaacaagaagtggggctagagcccgagagcagcagctctaagcccacactcagaaagtggcgccctcctggttgtgcagccttttaatgtgggcagtggaggggcctctgtttcaggttatcctggaattcaaaacgttatgtaccaacctcatcctctttggagtctgcatcctgtgcaaccgtcttgggcaatccagatgtcgaaggatgtgaccgagagcatggtctgtggatgctaaccctaagtttgtcgtaaggaaatttctgtaagaaacctggaaagccccaacgctgtgtctcatgctgtatacttaagaggagaagaaaaagtcctatatttgtgatcaaaaagaggaaacttgaaatgtgatggtgtttataataaaagatggtaaaactacttggattcaaa

SEQ ID NO: 547 - DNA, 10790 bp, Artificial Sequence
  Description of Artificial Sequence: Synthetic polynucleotide
aattgaggaatcaacagccgccatcttgtcgcggacccgaccggggcttcgagcgcgatctactcggccccgccggtcccgggccccacaaccgcccgcgcaccccgctccgcccggccggcccgctccgcccggccctcggcgcccgccccggcggccccgctcgcctctcggctcggcctcccggagcccggcggcggcggcggcggcagcggcggcggcggcggcggaacggggggtgggggggccgcggcggcggcggcgaccccgctcggcgcattgtttttcctcacggcggcggcggcggcgggccgcgggccgggagcggagcccggagccccctcgtcgtcgggccgcgagcgaattcattaagtggggcgcggggggggagcgaggcggcggcggcggcggcaccatgttctcggggactgcctgagccgcccggccgggcgccgtcgctgccagccgggcccgggggggcggccgggccgccggggcgcccccaccgcggagtgtcgcgctcgggaggcgggcaggggatgagggggccgcggccggcggcggcggcggcggccgggggcgggcggtgagcgctgcggggcgctgttgctgtggctgagatttggccgccgcctcccccacccggcctgcgccctccctctccctcggcgcccgcccgcccgctcgcggcccgcgctcgctcctctccctcgcagccggcagggcccccgacccccgtccgggccctcgccggcccggccgcccgtgcccggggctgttttcgcgagcaggtgaaaatggctgagaacttgctggacggaccgcccaaccccaaaagagccaaactcagctcgcccggtttctcggcgaatgacagcacagattttggatcattgtttgacttggaaaatgatcttcctgatgagctgatacccaatggaggagaattaggccttttaaacagtgggaaccttgttccagatgctgcttccaaacataaacaactgtcggagcttctacgaggaggcagcggctctagtatcaacccaggaataggaaatgtgagcgccagcagccccgtgcagcagggcctgggtggccaggctcaagggcagccgaacagtgctaacatggccagcctcagtgccatgggcaagagccctctgagccagggagattcttcagcccccagcctgcctaaacaggcagccagcacctctgggcccacccccgctgcctcccaagcactgaatccgcaagcacaaaagcaagtggggctggcgactagcagccctgccacgtcacagactggacctggtatctgcatgaatgctaactttaaccagacccacccaggcctcctcaatagtaactctggccatagcttaattaatcaggcttcacaagggcaggcgcaagtcatgaatggatctcttggggctgctggcagaggaaggggagctggaatgccgtaccctactccagccatgcagggcgcctcgagcagcgtgctggctgagaccctaacgcaggtttccccgcaaatgactggtcacgcgggactgaacaccgcacaggcaggaggcatggccaagatgggaataactgggaacacaagtccatttggacagccctttagtcaagctggagggcagccaatgggagccactggagtgaacccccagttagccagcaaacagagcatggtcaacagtttgcccaccttccctacagatatcaagaatacttcagtcaccaacgtgccaaatatgtctcagatgcaaacatcagtgggaattgtacccacacaagcaattgcaacaggccccactgcagatcctgaaaaacgcaaactgatacagcagcagctggttctactgcttcatgctcataagtgtcagagacgagagcaagcaaacggagaggttcgggcctgctcgctcccgcattgtcgaaccatgaaaaacgttttgaatcacatgacgcattgtcaggctgggaaagcctgccaagttgcccattgtgcatcttcacgacaaatcatctctcattggaagaactgcacacgacatgactgtcctgtttgcctccctttgaaaaatgccagtgacaagcgaaaccaacaaaccatcctggggtctccagctagtggaattcaaaacacaattggttctgttggcacagggcaacagaatgccacttctttaagtaacccaaatcccatagaccccagctccatgcagcgagcctatgctgctctcggactcccctacatgaaccagccccagacgcagctgcagcctcaggttcctggccagcaaccagcacagcctcaaacccaccagcagatgaggactctcaaccccctgggaaataatccaatgaacattccagcaggaggaataacaacagatcagcagcccccaaacttgatttcagaatcagctcttccgacttccctgggggccacaaacccactgatgaacgatggctccaactctggtaacattggaaccctcagcactataccaacagcagctcctccttctagcaccggtgtaaggaaaggctggcacgaacatgtcactcaggacctgcggagccatctagtgcataaactcgtccaagccatcttcccaacacctgatcccgcagctctaaaggatcgccgcatggaaaacctggtagcctatgctaagaaagtggaaggggacatgtacgagtctgccaacagcagggatgaatattatcacttattagcagagaaaatctacaagatacaaaaagaactagaagaaaaacggaggtcgcgtttacataaacaaggcatcttggggaaccagccagccttaccagccccgggggctcagccccctgtgattccacaggcacaacctgtgagacctccaaatggacccctgtccctgccagtgaatcgcatgcaagtttctcaagggatgaattcatttaaccccatgtccttggggaacgtccagttgccacaagcacccatgggacctcgtgcagcctccccaatgaaccactctgtccagatgaacagcatgggctcagtgccagggatggccatttctccttcccgaatgcctcagcctccgaacatgatgggtgcacacaccaacaacatgatggcccaggcgcccgctcagagccagtttctgccacagaaccagttcccgtcatccagcggggcgatgagtgtgggcatggggcagccgccagcccaaacaggcgtgtcacagggacaggtgcctggtgctgctcttcctaaccctctcaacatgctggggcctcaggccagccagctaccttgccctccagtgacacagtcaccactgcacccaacaccgcctcctgcttccacggctgctggcatgccatctctccagcacacgacaccacctgggatgactcctccccagccagcagctcccactcagccatcaactcctgtgtcgtcttccgggcagactcccaccccgactcctggctcagtgcccagtgctacccaaacccagagcacccctacagtccaggcagcagcccaggcccaggtgaccccgcagcctcaaaccccagttcagcccccgtctgtggctacccctcagtcatcgcagcaacagccgacgcctgtgcacgcccagcctcctggcacaccgctttcccaggcagcagccagcattgataacagagtccctaccccctcctcggtggccagcgcagaaaccaattcccagcagccaggacctgacgtacctgtgctggaaatgaagacggagacccaagcagaggacactgagcccgatcctggtgaatccaaaggggagcccaggtctgagatgatggaggaggatttgcaaggagcttcccaagttaaagaagaaacagacatagcagagcagaaatcagaaccaatggaagtggatgaaaagaaacctgaagtgaaagtagaagttaaagaggaagaagagagtagcagtaacggcacagcctctcagtcaacatctccttcgcagccgcgcaaaaaaatctttaaaccagaggagttacgccaggccctcatgccaaccctagaagcactgtatcgacaggacccagagtcattacctttccggcagcctgtagatccccagctcctcggaattccagactattttgacatcgtaaagaatcccatggacctctccaccatcaagcggaagctggacacagggcaataccaagagccctggcagtacgtggacgacgtctggctcatgttcaacaatgcctggctctataatcgcaagacatcccgagtctataagttttgcagtaagcttgcagaggtctttgagcaggaaattgaccctgtcatgcagtcccttggatattgctgtggacgcaagtatgagttttccccacagactttgtgctgctatgggaagcagctgtgtaccattcctcgcgatgctgcctactacagctatcagaataggtatcatttctgtgagaagtgtttcacagagatccagggcgagaatgtgaccctgggtgacgacccttcacagccccagacgacaatttcaaaggatcagtttgaaaagaagaaaaatgataccttagaccccgaacctttcgttgattgcaaggagtgtggccggaagatgcatcagatttgcgttctgcactatgacatcatttggccttcaggttttgtgtgcgacaactgcttgaagaaaactggcagacctcgaaaagaaaacaaattcagtgctaagaggctgcagaccacaagactgggaaaccacttggaagaccgagtgaacaaatttttgcggcgccagaatcaccctgaagccggggaggtttttgtccgagtggtggccagctcagacaagacggtggaggtcaagcccgggatgaagtcacggtttgtggattctggggaaatgtctgaatctttcccatatcgaaccaaagctctgtttgcttttgaggaaattgacggcgtggatgtctgcttttttggaatgcacgtccaagaatacggctctgattgcccccctccaaacacgaggcgtgtgtacatttcttatctggatagtattcatttcttccggccacgttgcctccgcacagccgtttaccatgagatccttattggatatttagagtatgtgaagaaattagggtatgtgacagggcacatctgggcctgtcctccaagtgaaggagatgattacatcttccattgccacccacctgatcaaaaaatacccaagccaaaacgactgcaggagtggtacaaaaagatgctggacaaggcgtttgcagagcggatcatccatgactacaaggatattttcaaacaagcaactgaagacaggctcaccagtgccaaggaactgccctattttgaaggtgatttctggcccaatgtgttagaagagagcattaaggaactagaacaagaagaagaggagaggaaaaaggaagagagcactgcagccagtgaaaccactgagggcagtcagggcgacagcaagaatgccaagaagaagaacaacaagaaaaccaacaagaacaaaagcagcatcagccgcgccaacaagaagaagcccagcatgcccaacgtgtccaatgacctgtcccagaagctgtatgccaccatggagaagcacaaggaggtcttcttcgtgatccacctgcacgctgggcctgtcatcaacaccctgccccccatcgtcgaccccgaccccctgctcagctgtgacctcatggatgggcgcgacgccttcctcaccctcgccagagacaagcactgggagttctcctccttgcgccgctccaagtggtccacgctctgcatgctggtggagctgcacacccagggccaggaccgctttgtctacacctgcaacgagtgcaagcaccacgtggagacgcgctggcactgcactgtgtgcgaggactacgacctctgcatcaactgctataacacgaagagccatgcccataagatggtgaagtgggggctgggcctggatgacgagggcagcagccagggcgagccacagtcaaagagcccccaggagtcacgccggctgagcatccagcgctgcatccagtcgctggtgcacgcgtgccagtgccgcaacgccaactgctcgctgccatcctgccagaagatgaagcgggtggtgcagcacaccaagggctgcaaacgcaagaccaacgggggctgcccggtgtgcaagcagctcatcgccctctgctgctaccacgccaagcactgccaagaaaacaaatgccccgtgcccttctgcctcaacatcaaacacaagctccgccagcagcagatccagcaccgcctgcagcaggcccagctcatgcgccggcggatggccaccatgaacacccgcaacgtgcctcagcagagtctgccttctcctacctcagcaccgcccgggacccccacacagcagcccagcacaccccagacgccgcagccccctgcccagccccaaccctcacccgtgagcatgtcaccagctggcttccccagcgtggcccggactcagccccccaccacggtgtccacagggaagcctaccagccaggtgccggcccccccacccccggcccagccccctcctgcagcggtggaagcggctcggcagatcgagcgtgaggcccagcagcagcagcacctgtaccgggtgaacatcaacaacagcatgcccccaggacgcacgggcatggggaccccggggagccagatggcccccgtgagcctgaatgtgccccgacccaaccaggtgagcgggcccgtcatgcccagcatgcctcccgggcagtggcagcaggcgccccttccccagcagcagcccatgccaggcttgcccaggcctgtgatatccatgcaggcccaggcggccgtggctgggccccggatgcccagcgtgcagccacccaggagcatctcacccagcgctctgcaagacctgctgcggaccctgaagtcgcccagctcccctcagcagcaacagcaggtgctgaacattctcaaatcaaacccgcagctaatggcagctttcatcaaacagcgcacagccaagtacgtggccaatcagcccggcatgcagccccagcctggcctccagtcccagcccggcatgcaaccccagcctggcatgcaccagcagcccagcctgcagaacctgaatgccatgcaggctggcgtgccgcggcccggtgtgcctccacagcagcaggcgatgggaggcctgaacccccagggccaggccttgaacatcatgaacccaggacacaaccccaacatggcgagtatgaatccacagtaccgagaaatgttacggaggcagctgctgcagcagcagcagcaacagcagcagcaacaacagcagcaacagcagcagcagcaagggagtgccggcatggctgggggcatggcggggcacggccagttccagcagcctcaaggacccggaggctacccaccggccatgcagcagcagcagcgcatgcagcagcatctccccctccagggcagctccatgggccagatggcggctcagatgggacagcttggccagatggggcagccggggctgggggcagacagcacccccaacatccagcaagccctgcagcagcggattctgcagcaacagcagatgaagcagcagattgggtccccaggccagccgaaccccatgagcccccagcaacacatgctctcaggacagccacaggcctcgcatctccctggccagcagatcgccacgtcccttagtaaccaggtgcggtctccagcccctgtccagtctccacggccccagtcccagcctccacattccagcccgtcaccacggatacagccccagccttcgccacaccacgtctcaccccagactggttccccccaccccggactcgcagtcaccatggccagctccatagatcagggacacttggggaaccccgaacagagtgcaatgctcccccagctgaacacccccagcaggagtgcgctgtccagcgaactgtccctggtcggggacaccacgggggacacgctagagaagtttgtggagggcttgtagcattgtgagagcatcaccttttccctttcatgttcttggaccttttgtactgaaaatccaggcatctaggttctttttattcctagatggaactgcgacttccgagccatggaagggtggattgatgtttaaagaaacaatacaaagaatatatttttttgttaaaaaccagttgatttaaatatctggtctctctctttggtttttttttggcgggggggtggggggggttcttttttttccgttttgtttttgtttggggggaggggggttttgtttggattctttttgtcgtcattgctggtgactcatgcctttttttaacgggaaaaacaagttcattatattcatattttttatttgtattttcaagactttaaacatttatgtttaaaagtaagaagaaaaataatattcagaactgattcctgaaataatgcaagcttataatgtatcccgataactttgtgatgtttcgggaagatttttttctatagtgaactctgtgggcgtctcccagtattaccctggatgataggaattgactccggcgtgcacacacgtacacacccacacacatctatctatacataatggctgaagccaaacttgtcttgcagatgtagaaattgttgctttgtttctctgataaaactggttttagacaaaaaatagggatgatcactcttagaccatgctaatgttactagagaagaagccttcttttctttcttctatgtgaaacttgaaatgaggaaaagcaattctagtgtaaatcatgcaagcgctctaattcctataaatacgaaactcgagaagattcaatcactgtatagaatggtaaaataccaactcatttcttatatcatattgttaaataaactgtgtgcaacagacaaaaagggtggtccttcttgaattcatgtacatggtattaacacttagtgttcggggttttttgttatgaaaatgctgttttcaacattgtatttggactatgcatgtgttttttccccattgtatataaagtaccgcttaaaattgatataaattactgaggtttttaacatgtattctgttctttaagatccctgtaagaatgtttaaggtttttatttatttatatatattttttgagtctgttctttgtaagacatggttctggttgttcgctcatagcggagaggctggggctgcggttgtggttgtggcggcgtgggtggtggctgggaactgtggcccaggcttagcggccgcccggaggcttttcttcccggagactgaggtgggcgactgaggtgggcggctcagcgttggccccacacattcgaggctcacaggtgattgtcgctcacacagttagggtcgtcagttggtctgaaactgcatttggcccactcctccatcctccctgtccgtcgtagctgccacccccagaggcggcgcttcttcccgtgttcaggcggctccccccccccgtacacgactcccagaatctgaggcagagagtgctccaggctcgcgaggtgctttctgacttccccccaaatcctgccgctgccgcgcagcatgtcccgtgtggcgtttgaggaaatgctgagggacagacaccttggagcaccagctccggtccctgttacagtgagaaaggtcccccacttcgggggatacttgcacttagccacatggtcctgcctcccttggagtccagttccaggctcccttactgagtgggtgagacaagttcacaaaaaccgtaaaactgagaggaggaccatgggcaggggagctgaagttcatcccctaagtctaccacccccagcacccagagaacccactttatccctagtcccccaacaaaggctggtctaggtgggggtgatggtaattttagaaatcacgccccaaatagcttccgtttgggcccttacattcacagataggttttaaatagctgaatacttggtttgggaatctgaattcgaggaacctttctaagaagttggaaaggtccgatctagttttagcacagagctttgaaccttgagttataaaatgcagaataattcaagtaaaaataagaccaccatctggcacccctgaccagcccccattcaccccatcccaggaggggaagcacaggccgggcctccggtggagattgctgccactgctcggcctgctgggttcttaacctccagtgtcctcttcatcttttccacccgtagggaaaccttgagccatgtgttcaaacaagaagtggggctagagcccgagagcagcagctctaagcccacactcagaaagtggcgccctcctggttgtgcagccttttaatgtgggcagtggaggggcctctgtttcaggttatcctggaattcaaaacgttatgtaccaacctcatcctctttggagtctgcatcctgtgcaaccgtcttgggcaatccagatgtcgaaggatgtgaccgagagcatggtctgtggatgctaaccctaagtttgtcgtaaggaaatttctgtaagaaacctggaaagccccaacgctgtgtctcatgctgtatacttaagaggagaagaaaaagtcctatatttgtgatcaaaaagaggaaacttgaaatgtgatggtgtttataataaaagatggtaaaactacttggattcaaa

SEQ ID NO: 548 - DNA, 8779 bp, Artificial Sequence
  Description of Artificial Sequence: Synthetic polynucleotide
gagaaggaggaggacagcgccgaggaggaagaggttgatggcggcggcggagctccgagagacctcggctgggcaggggccggccgtggcgggccggggactgcgcctctagagccgcgagttctcgggaattcgccgcagcggacgcgctcggcgaatttgtgctcttgtgccctcctccgggcttgggcccaggcccggcccctcgcacttgcccttaccttttctatcgagtccgcatccctctccagccactgcgacccggcgaagagaaaaaggaacttcccccaccccctcgggtgccgtcggagccccccagcccacccctgggtgcggcgcggggaccccgggccgaagaagagatttcctgaggattctggttttcctcgcttgtatctccgaaagaattaaaaatggccgagaatgtggtggaaccggggccgccttcagccaagcggcctaaactctcatctccggccctctcggcgtccgccagcgatggcacagattttggctctctatttgacttggagcacgacttaccagatgaattaatcaactctacagaattgggactaaccaatggtggtgatattaatcagcttcagacaagtcttggcatggtacaagatgcagcttctaaacataaacagctgtcagaattgctgcgatctggtagttcccctaacctcaatatgggagttggtggcccaggtcaagtcatggccagccaggcccaacagagcagtcctggattaggtttgataaatagcatggtcaaaagcccaatgacacaggcaggcttgacttctcccaacatggggatgggcactagtggaccaaatcagggtcctacgcagtcaacaggtatgatgaacagtccagtaaatcagcctgccatgggaatgaacacagggatgaatgcgggcatgaatcctggaatgttggctgcaggcaatggacaagggataatgcctaatcaagtcatgaacggttcaattggagcaggccgagggcgacagaatatgcagtacccaaacccaggcatgggaagtgctggcaacttactgactgagcctcttcagcagggctctccccagatgggaggacaaacaggattgagaggcccccagcctcttaagatgggaatgatgaacaaccccaatccttatggttcaccatatactcagaatcctggacagcagattggagccagtggccttggtctccagattcagacaaaaactgtactatcaaataacttatctccatttgctatggacaaaaaggcagttcctggtggaggaatgcccaacatgggtcaacagccagccccgcaggtccagcagccaggcctggtgactccagttgcccaagggatgggttctggagcacatacagctgatccagagaagcgcaagctcatccagcagcagcttgttctccttttgcatgctcacaagtgccagcgccgggaacaggccaatggggaagtgaggcagtgcaaccttccccactgtcgcacaatgaagaatgtcctaaaccacatgacacactgccagtcaggcaagtcttgccaagtggcacactgtgcatcttctcgacaaatcatttcacactggaagaattgtacaagacatgattgtcctgtgtgtctccccctcaaaaatgctggtgataagagaaatcaacagccaattttgactggagcacccgttggacttggaaatcctagctctctaggggtgggtcaacagtctgcccccaacctaagcactgttagtcagattgatcccagctccatagaaagagcctatgcagctcttggactaccctatcaagtaaatcagatgccgacacaaccccaggtgcaagcaaagaaccagcagaatcagcagcctgggcagtctccccaaggcatgcggcccatgagcaacatgagtgctagtcctatgggagtaaatggaggtgtaggagttcaaacgccgagtcttctttctgactcaatgttgcattcagccataaattctcaaaacccaatgatgagtgaaaatgccagtgtgccctccctgggtcctatgccaacagcagctcaaccatccactactggaattcggaaacagtggcacgaagatattactcaggatcttcgaaatcatcttgttcacaaactcgtccaagccatatttcctacgccggatcctgctgctttaaaagacagacggatggaaaacctagttgcatatgctcggaaagttgaaggggacatgtatgaatctgcaaacaatcgagcggaatactaccaccttctagctgagaaaatctataagatccagaaagaactagaagaaaaacgaaggaccagactacagaagcagaacatgctaccaaatgctgcaggcatggttccagtttccatgaatccagggcctaacatgggacagccgcaaccaggaatgacttctaatggccctctacctgacccaagtatgatccgtggcagtgtgccaaaccagatgatgcctcgaataactccacaatctggtttgaatcaatttggccagatgagcatggcccagccccctattgtaccccggcaaacccctcctcttcagcaccatggacagttggctcaacctggagctctcaacccgcctatgggctatgggcctcgtatgcaacagccttccaaccagggccagttccttcctcagactcagttcccatcacagggaatgaatgtaacaaatatccctttggctccgtccagcggtcaagctccagtgtctcaagcacaaatgtctagttcttcctgcccggtgaactctcctataatgcctccagggtctcaggggagccacattcactgtccccagcttcctcaaccagctcttcatcagaattcaccctcgcctgtacctagtcgtacccccacccctcaccatactcccccaagcataggggctcagcagccaccagcaacaacaattccagcccctgttcctacacctcctgccatgccacctgggccacagtcccaggctctacatccccctccaaggcagacacctacaccaccaacaacacaacttccccaacaagtgcagccttcacttcctgctgcaccttctgctgaccagccccagcagcagcctcgctcacagcagagcacagcagcgtctgttcctaccccaacagcaccgctgcttcctccgcagcctgcaactccactttcccagccagctgtaagcattgaaggacaggtatcaaatcctccatctactagtagcacagaagtgaattctcaggccattgctgagaagcagccttcccaggaagtgaagatggaggccaaaatggaagtggatcaaccagaaccagcagatactcagccggaggatatttcagagtctaaagtggaagactgtaaaatggaatctaccgaaacagaagagagaagcactgagttaaaaactgaaataaaagaggaggaagaccagccaagtacttcagctacccagtcatctccggctccaggacagtcaaagaaaaagattttcaaaccagaagaactacgacaggcactgatgccaactttggaggcactttaccgtcaggatccagaatcccttccctttcgtcaacctgtggaccctcagcttttaggaatccctgattactttgatattgtgaagagccccatggatctttctaccattaagaggaagttagacactggacagtatcaggagccctggcagtatgtcgatgatatttggcttatgttcaataatgcctggttatataaccggaaaacatcacgggtatacaaatactgctccaagctctctgaggtctttgaacaagaaattgacccagtgatgcaaagccttggatactgttgtggcagaaagttggagttctctccacagacactgtgttgctacggcaaacagttgtgcacaatacctcgtgatgccacttattacagttaccagaacaggtatcatttctgtgagaagtgtttcaatgagatccaaggggagagcgtttctttgggggatgacccttcccagcctcaaactacaataaataaagaacaattttccaagagaaaaaatgacacactggatcctgaactgtttgttgaatgtacagagtgcggaagaaagatgcatcagatctgtgtccttcaccatgagatcatctggcctgctggattcgtctgtgatggctgtttaaagaaaagtgcacgaactaggaaagaaaataagttttctgctaaaaggttgccatctaccagacttggcacctttctagagaatcgtgtgaatgactttctgaggcgacagaatcaccctgagtcaggagaggtcactgttagagtagttcatgcttctgacaaaaccgtggaagtaaaaccaggcatgaaagcaaggtttgtggacagtggagagatggcagaatcctttccataccgaaccaaagccctctttgcctttgaagaaattgatggtgttgacctgtgcttctttggcatgcatgttcaagagtatggctctgactgccctccacccaaccagaggagagtatacatatcttacctcgatagtgttcatttcttccgtcctaaatgcttgaggactgcagtctatcatgaaatcctaattggatatttagaatatgtcaagaaattaggttacacaacagggcatatttgggcatgtccaccaagtgagggagatgattatatcttccattgccatcctcctgaccagaagatacccaagcccaagcgactgcaggaatggtacaaaaaaatgcttgacaaggctgtatcagagcgtattgtccatgactacaaggatatttttaaacaagctactgaagatagattaacaagtgcaaaggaattgccttatttcgagggtgatttctggcccaatgttctggaagaaagcattaaggaactggaacaggaggaagaagagagaaaacgagaggaaaacaccagcaatgaaagcacagatgtgaccaagggagacagcaaaaatgctaaaaagaagaataataagaaaaccagcaaaaataagagcagcctgagtaggggcaacaagaagaaacccgggatgcccaatgtatctaacgacctctcacagaaactatatgccaccatggagaagcataaagaggtcttctttgtgatccgcctcattgctggccctgctgccaactccctgcctcccattgttgatcctgatcctctcatcccctgcgatctgatggatggtcgggatgcgtttctcacgctggcaagggacaagcacctggagttctcttcactccgaagagcccagtggtccaccatgtgcatgctggtggagctgcacacgcagagccaggaccgctttgtctacacctgcaatgaatgcaagcaccatgtggagacacgctggcactgtactgtctgtgaggattatgacttgtgtatcacctgctataacactaaaaaccatgaccacaaaatggagaaactaggccttggcttagatgatgagagcaacaaccagcaggctgcagccacccagagcccaggcgattctcgccgcctgagtatccagcgctgcatccagtctctggtccatgcttgccagtgtcggaatgccaattgctcactgccatcctgccagaagatgaagcgggttgtgcagcataccaagggttgcaaacggaaaaccaatggcgggtgccccatctgcaagcagctcattgccctctgctgctaccatgccaagcactgccaggagaacaaatgcccggtgccgttctgcctaaacatcaagcagaagctccggcagcaacagctgcagcaccgactacagcaggcccaaatgcttcgcaggaggatggccagcatgcagcggactggtgtggttgggcagcaacagggcctcccttcccccactcctgccactccaacgacaccaactggccaacagccaaccaccccgcagacgccccagcccacttctcagcctcagcctacccctcccaatagcatgccaccctacttgcccaggactcaagctgctggccctgtgtcccagggtaaggcagcaggccaggtgacccctccaacccctcctcagactgctcagccaccccttccagggcccccacctgcagcagtggaaatggcaatgcagattcagagagcagcggagacgcagcgccagatggcccacgtgcaaatttttcaaaggccaatccaacaccagatgcccccgatgactcccatggcccccatgggtatgaacccacctcccatgaccagaggtcccagtgggcatttggagccagggatgggaccgacagggatgcagcaacagccaccctggagccaaggaggattgcctcagccccagcaactacagtctgggatgccaaggccagccatgatgtcagtggcccagcatggtcaacctttgaacatggctccacaaccaggattgggccaggtaggtatcagcccactcaaaccaggcactgtgtctcaacaagccttacaaaaccttttgcggactctcaggtctcccagctctcccctgcagcagcaacaggtgcttagtatccttcacgccaacccccagctgttggctgcattcatcaagcagcgggctgccaagtatgccaactctaatccacaacccatccctgggcagcctggcatgccccaggggcagccagggctacagccacctaccatgccaggtcagcagggggtccactccaatccagccatgcagaacatgaatccaatgcaggcgggcgttcagagggctggcctgccccagcagcaaccacagcagcaactccagccacccatgggagggatgagcccccaggctcagcagatgaacatgaaccacaacaccatgccttcacaattccgagacatcttgagacgacagcaaatgatgcaacagcagcagcaacagggagcagggccaggaataggccctggaatggccaaccataaccagttccagcaaccccaaggagttggctacccaccacagcagcagcagcggatgcagcatcacatgcaacagatgcaacaaggaaatatgggacagataggccagcttccccaggccttgggagcagaggcaggtgccagtctacaggcctatcagcagcgactccttcagcaacagatggggtcccctgttcagcccaaccccatgagcccccagcagcatatgctcccaaatcaggcccagtccccacacctacaaggccagcagatccctaattctctctccaatcaagtgcgctctccccagcctgtcccttctccacggccacagtcccagcccccccactccagtccttccccaaggatgcagcctcagccttctccacaccacgtttccccacagacaagttccccacatcctggactggtagctgcccaggccaaccccatggaacaagggcattttgccagcccggaccagaattcaatgctttctcagcttgctagcaatccaggcatggcaaacctccatggtgcaagcgccacggacctgggactcagcaccgataactcagacttgaattcaaacctctcacagagtacactagacatacactagagacaccttgtagtattttgggagcaaaaaaattattttctcttaacaagactttttgtactgaaaacaatttttttgaatctttcgtagcctaaaagacaattttccttggaacacataagaactgtgcagtagccgtttgtggtttaaagcaaacatgcaagatgaacctgagggatgatagaatacaaagaatatatttttgttatggctggttaccaccagcctttcttcccctttgtgtgtgtggttcaagtgtgcactgggaggaggctgaggcctgtgaagccaaacaatatgctcctgccttgcacctccaataggttttattattttttttaaattaatgaacatatgtaatattaatagttattatttactggtgcagatggttgacatttttccctattttcctcactttatggaagagttaaaacatttctaaaccagaggacaaaaggggttaatgttactttaaaattacattctatatatatataaatatatataaatatatattaaaataccagttttttttctctgggtgcaaagatgttcattcttttaaaaaatgtttaaaaaaaaaaaaaaactgcctttcttcccctcaagtcaacttttgtgctccagaaaattttctattctgtaagtctgagcgtaaaacttcaagtattaaaataatttgtacatgtagagagaaaaatgactttttcaaaaatatacaggggcagctgccaaattgatgtattatatattgtggtttctgtttcttgaaagaatttttttcgttatttttacatctaacaaagtaaaaaaattaaaaagagggtaagaaacgattccggtgggatgattttaacatgcaaaatgtccctgggggtttcttctttgcttgctttcttcctccttaccctaccccccactcacacacacacacacacacacacacacacacacacacacacactttctataaaacttgaaaatagcaaaaaccctcaactgttgtaaatcatgcaattaaagttgattacttataaatatgaactttggatcactgtatagactgttaaatttgatttcttattacctattgttaaataaactgtgtgagacagaca

SEQ ID NO: 549 - DNA, 8701 bp, Artificial Sequence
  Description of Artificial Sequence: Synthetic polynucleotide
gagaaggaggaggacagcgccgaggaggaagaggttgatggcggcggcggagctccgagagacctcggctgggcaggggccggccgtggcgggccggggactgcgcctctagagccgcgagttctcgggaattcgccgcagcggacgcgctcggcgaatttgtgctcttgtgccctcctccgggcttgggcccaggcccggcccctcgcacttgcccttaccttttctatcgagtccgcatccctctccagccactgcgacccggcgaagagaaaaaggaacttcccccaccccctcgggtgccgtcggagccccccagcccacccctgggtgcggcgcggggaccccgggccgaagaagagatttcctgaggattctggttttcctcgcttgtatctccgaaagaattaaaaatggccgagaatgtggtggaaccggggccgccttcagccaagcggcctaaactctcatctccggccctctcggcgtccgccagcgatggcacagattttggctctctatttgacttggagcacgacttaccagatgaattaatcaactctacagaattgggactaaccaatggtggtgatattaatcagcttcagacaagtcttggcatggtacaagatgcagcttctaaacataaacagctgtcagaattgctgcgatctggtagttcccctaacctcaatatgggagttggtggcccaggtcaagtcatggccagccaggcccaacagagcagtcctggattaggtttgataaatagcatggtcaaaagcccaatgacacaggcaggcttgacttctcccaacatggggatgggcactagtggaccaaatcagggtcctacgcagtcaacaggtatgatgaacagtccagtaaatcagcctgccatgggaatgaacacagggatgaatgcgggcatgaatcctggaatgttggctgcaggcaatggacaagggataatgcctaatcaagtcatgaacggttcaattggagcaggccgagggcgacagaatatgcagtacccaaacccaggcatgggaagtgctggcaacttactgactgagcctcttcagcagggctctccccagatgggaggacaaacaggattgagaggcccccagcctcttaagatgggaatgatgaacaaccccaatccttatggttcaccatatactcagaatcctggacagcagattggagccagtggccttggtctccagattcagacaaaaactgtactatcaaataacttatctccatttgctatggacaaaaaggcagttcctggtggaggaatgcccaacatgggtcaacagccagccccgcaggtccagcagccaggcctggtgactccagttgcccaagggatgggttctggagcacatacagctgatccagagaagcgcaagctcatccagcagcagcttgttctccttttgcatgctcacaagtgccagcgccgggaacaggccaatggggaagtgaggcagtgcaaccttccccactgtcgcacaatgaagaatgtcctaaaccacatgacacactgccagtcaggcaagtcttgccaagtggcacactgtgcatcttctcgacaaatcatttcacactggaagaattgtacaagacatgattgtcctgtgtgtctccccctcaaaaatgctggtgataagagaaatcaacagccaattttgactggagcacccgttggacttggaaatcctagctctctaggggtgggtcaacagtctgcccccaacctaagcactgttagtcagattgatcccagctccatagaaagagcctatgcagctcttggactaccctatcaagtaaatcagatgccgacacaaccccaggtgcaagcaaagaaccagcagaatcagcagcctgggcagtctccccaaggcatgcggcccatgagcaacatgagtgctagtcctatgggagtaaatggaggtgtaggagttcaaacgccgagtcttctttctgactcaatgttgcattcagccataaattctcaaaacccaatgatgagtgaaaatgccagtgtgccctccctgggtcctatgccaacagcagctcaaccatccactactggaattcggaaacagtggcacgaagatattactcaggatcttcgaaatcatcttgttcacaaactcgtccaagccatatttcctacgccggatcctgctgctttaaaagacagacggatggaaaacctagttgcatatgctcggaaagttgaaggggacatgtatgaatctgcaaacaatcgagcggaatactaccaccttctagctgagaaaatctataagatccagaaagaactagaagaaaaacgaaggaccagactacagaagcagaacatgctaccaaatgctgcaggcatggttccagtttccatgaatccagggcctaacatgggacagccgcaaccaggaatgacttctagtttgaatcaatttggccagatgagcatggcccagccccctattgtaccccggcaaacccctcctcttcagcaccatggacagttggctcaacctggagctctcaacccgcctatgggctatgggcctcgtatgcaacagccttccaaccagggccagttccttcctcagactcagttcccatcacagggaatgaatgtaacaaatatccctttggctccgtccagcggtcaagctccagtgtctcaagcacaaatgtctagttcttcctgcccggtgaactctcctataatgcctccagggtctcaggggagccacattcactgtccccagcttcctcaaccagctcttcatcagaattcaccctcgcctgtacctagtcgtacccccacccctcaccatactcccccaagcataggggctcagcagccaccagcaacaacaattccagcccctgttcctacacctcctgccatgccacctgggccacagtcccaggctctacatccccctccaaggcagacacctacaccaccaacaacacaacttccccaacaagtgcagccttcacttcctgctgcaccttctgctgaccagccccagcagcagcctcgctcacagcagagcacagcagcgtctgttcctaccccaacagcaccgctgcttcctccgcagcctgcaactccactttcccagccagctgtaagcattgaaggacaggtatcaaatcctccatctactagtagcacagaagtgaattctcaggccattgctgagaagcagccttcccaggaagtgaagatggaggccaaaatggaagtggatcaaccagaaccagcagatactcagccggaggatatttcagagtctaaagtggaagactgtaaaatggaatctaccgaaacagaagagagaagcactgagttaaaaactgaaataaaagaggaggaagaccagccaagtacttcagctacccagtcatctccggctccaggacagtcaaagaaaaagattttcaaaccagaagaactacgacaggcactgatgccaactttggaggcactttaccgtcaggatccagaatcccttccctttcgtcaacctgtggaccctcagcttttaggaatccctgattactttgatattgtgaagagccccatggatctttctaccattaagaggaagttagacactggacagtatcaggagccctggcagtatgtcgatgatatttggcttatgttcaataatgcctggttatataaccggaaaacatcacgggtatacaaatactgctccaagctctctgaggtctttgaacaagaaattgacccagtgatgcaaagccttggatactgttgtggcagaaagttggagttctctccacagacactgtgttgctacggcaaacagttgtgcacaatacctcgtgatgccacttattacagttaccagaacaggtatcatttctgtgagaagtgtttcaatgagatccaaggggagagcgtttctttgggggatgacccttcccagcctcaaactacaataaataaagaacaattttccaagagaaaaaatgacacactggatcctgaactgtttgttgaatgtacagagtgcggaagaaagatgcatcagatctgtgtccttcaccatgagatcatctggcctgctggattcgtctgtgatggctgtttaaagaaaagtgcacgaactaggaaagaaaataagttttctgctaaaaggttgccatctaccagacttggcacctttctagagaatcgtgtgaatgactttctgaggcgacagaatcaccctgagtcaggagaggtcactgttagagtagttcatgcttctgacaaaaccgtggaagtaaaaccaggcatgaaagcaaggtttgtggacagtggagagatggcagaatcctttccataccgaaccaaagccctctttgcctttgaagaaattgatggtgttgacctgtgcttctttggcatgcatgttcaagagtatggctctgactgccctccacccaaccagaggagagtatacatatcttacctcgatagtgttcatttcttccgtcctaaatgcttgaggactgcagtctatcatgaaatcctaattggatatttagaatatgtcaagaaattaggttacacaacagggcatatttgggcatgtccaccaagtgagggagatgattatatcttccattgccatcctcctgaccagaagatacccaagcccaagcgactgcaggaatggtacaaaaaaatgcttgacaaggctgtatcagagcgtattgtccatgactacaaggatatttttaaacaagctactgaagatagattaacaagtgcaaaggaattgccttatttcgagggtgatttctggcccaatgttctggaagaaagcattaaggaactggaacaggaggaagaagagagaaaacgagaggaaaacaccagcaatgaaagcacagatgtgaccaagggagacagcaaaaatgctaaaaagaagaataataagaaaaccagcaaaaataagagcagcctgagtaggggcaacaagaagaaacccgggatgcccaatgtatctaacgacctctcacagaaactatatgccaccatggagaagcataaagaggtcttctttgtgatccgcctcattgctggccctgctgccaactccctgcctcccattgttgatcctgatcctctcatcccctgcgatctgatggatggtcgggatgcgtttctcacgctggcaagggacaagcacctggagttctcttcactccgaagagcccagtggtccaccatgtgcatgctggtggagctgcacacgcagagccaggaccgctttgtctacacctgcaatgaatgcaagcaccatgtggagacacgctggcactgtactgtctgtgaggattatgacttgtgtatcacctgctataacactaaaaaccatgaccacaaaatggagaaactaggccttggcttagatgatgagagcaacaaccagcaggctgcagccacccagagcccaggcgattctcgccgcctgagtatccagcgctgcatccagtctctggtccatgcttgccagtgtcggaatgccaattgctcactgccatcctgccagaagatgaagcgggttgtgcagcataccaagggttgcaaacggaaaaccaatggcgggtgccccatctgcaagcagctcattgccctctgctgctaccatgccaagcactgccaggagaacaaatgcccggtgccgttctgcctaaacatcaagcagaagctccggcagcaacagctgcagcaccgactacagcaggcccaaatgcttcgcaggaggatggccagcatgcagcggactggtgtggttgggcagcaacagggcctcccttcccccactcctgccactccaacgacaccaactggccaacagccaaccaccccgcagacgccccagcccacttctcagcctcagcctacccctcccaatagcatgccaccctacttgcccaggactcaagctgctggccctgtgtcccagggtaaggcagcaggccaggtgacccctccaacccctcctcagactgctcagccaccccttccagggcccccacctgcagcagtggaaatggcaatgcagattcagagagcagcggagacgcagcgccagatggcccacgtgcaaatttttcaaaggccaatccaacaccagatgcccccgatgactcccatggcccccatgggtatgaacccacctcccatgaccagaggtcccagtgggcatttggagccagggatgggaccgacagggatgcagcaacagccaccctggagccaaggaggattgcctcagccccagcaactacagtctgggatgccaaggccagccatgatgtcagtggcccagcatggtcaacctttgaacatggctccacaaccaggattgggccaggtaggtatcagcccactcaaaccaggcactgtgtctcaacaagccttacaaaaccttttgcggactctcaggtctcccagctctcccctgcagcagcaacaggtgcttagtatccttcacgccaacccccagctgttggctgcattcatcaagcagcgggctgccaagtatgccaactctaatccacaacccatccctgggcagcctggcatgccccaggggcagccagggctacagccacctaccatgccaggtcagcagggggtccactccaatccagccatgcagaacatgaatccaatgcaggcgggcgttcagagggctggcctgccccagcagcaaccacagcagcaactccagccacccatgggagggatgagcccccaggctcagcagatgaacatgaaccacaacaccatgccttcacaattccgagacatcttgagacgacagcaaatgatgcaacagcagcagcaacagggagcagggccaggaataggccctggaatggccaaccataaccagttccagcaaccccaaggagttggctacccaccacagcagcagcagcggatgcagcatcacatgcaacagatgcaacaaggaaatatgggacagataggccagcttccccaggccttgggagcagaggcaggtgccagtctacaggcctatcagcagcgactccttcagcaacagatggggtcccctgttcagcccaaccccatgagcccccagcagcatatgctcccaaatcaggcccagtccccacacctacaaggccagcagatccctaattctctctccaatcaagtgcgctctccccagcctgtcccttctccacggccacagtcccagcccccccactccagtccttccccaaggatgcagcctcagccttctccacaccacgtttccccacagacaagttccccacatcctggactggtagctgcccaggccaaccccatggaacaagggcattttgccagcccggaccagaattcaatgctttctcagcttgctagcaatccaggcatggcaaacctccatggtgcaagcgccacggacctgggactcagcaccgataactcagacttgaattcaaacctctcacagagtacactagacatacactagagacaccttgtagtattttgggagcaaaaaaattattttctcttaacaagactttttgtactgaaaacaatttttttgaatctttcgtagcctaaaagacaattttccttggaacacataagaactgtgcagtagccgtttgtggtttaaagcaaacatgcaagatgaacctgagggatgatagaatacaaagaatatatttttgttatggctggttaccaccagcctttcttcccctttgtgtgtgtggttcaagtgtgcactgggaggaggctgaggcctgtgaagccaaacaatatgctcctgccttgcacctccaataggttttattattttttttaaattaatgaacatatgtaatattaatagttattatttactggtgcagatggttgacatttttccctattttcctcactttatggaagagttaaaacatttctaaaccagaggacaaaaggggttaatgttactttaaaattacattctatatatatataaatatatataaatatatattaaaataccagttttttttctctgggtgcaaagatgttcattcttttaaaaaatgtttaaaaaaaaaaaaaaactgcctttcttcccctcaagtcaacttttgtgctccagaaaattttctattctgtaagtctgagcgtaaaacttcaagtattaaaataatttgtacatgtagagagaaaaatgactttttcaaaaatatacaggggcagctgccaaattgatgtattatatattgtggtttctgtttcttgaaagaatttttttcgttatttttacatctaacaaagtaaaaaaattaaaaagagggtaagaaacgattccggtgggatgattttaacatgcaaaatgtccctgggggtttcttctttgcttgctttcttcctccttaccctaccccccactcacacacacacacacacacacacacacacacacacacacacactttctataaaacttgaaaatagcaaaaaccctcaactgttgtaaatcatgcaattaaagttgattacttataaatatgaactttggatcactgtatagactgttaaatttgatttcttattacctattgttaaataaactgtgtgagacagaca

SEQ ID NO: 550 - protein, 4 aa, Artificial Sequence
  Description of Artificial Sequence: Synthetic peptide
GAGA

SEQ ID NO: 551 - protein, 4 aa, Artificial Sequence
  Description of Artificial Sequence: Synthetic peptide
GFLG

SEQ ID NO: 552 - RNA, 20 nt, Artificial Sequence
  Description of Artificial Sequence: Synthetic oligonucleotide
gccguacaguuccacaaagg

SEQ ID NO: 553 - RNA, 15 nt, Artificial Sequence
  Description of Artificial Sequence: Synthetic oligonucleotide
cugccagguaaguau

SEQ ID NO: 554 - protein, 49 aa, Artificial Sequence
  Description of Artificial Sequence: Synthetic polypeptide
EHDCKVHCVKEWMAGHACAERQKSYTIGRAHCSGQKFDVFKCLDHCAAP

SEQ ID NO: 555 - protein, 49 aa, Artificial Sequence
  Description of Artificial Sequence: Synthetic polypeptide
EHDCKVHCVKEWMAGKACAERQKSYTIGRAHCSGQKFDVFKCLDHCAAP

SEQ ID NO: 556 - protein, 49 aa, Artificial Sequence
  Description of Artificial Sequence: Synthetic polypeptide
EEDCKVHCVKEWHAGKACAERQKSYTIGRAHCSGQKFDVFKCLDHCAAP

SEQ ID NO: 557 - protein, 49 aa, Artificial Sequence
  Description of Artificial Sequence: Synthetic polypeptide
EEDCKVHCVKEWMAGHACAERQKSYTIGRAHCSGQKFDVFKCLDHCAAP

SEQ ID NO: 558 - protein, 49 aa, Artificial Sequence
  Description of Artificial Sequence: Synthetic polypeptide
EHDCKVHCVKEWHAGKACAERQKSYTIGRAHCSGQKFDVFKCLDHCAAP

SEQ ID NO: 559 - protein, 49 aa, Artificial Sequence
  Description of Artificial Sequence: Synthetic polypeptide
EEDCKVHCVKEWHAGHACAERQKSYTIGRAHCSGQKFDVFKCLDHCAAP

SEQ ID NO: 560 - protein, 49 aa, Artificial Sequence
  Description of Artificial Sequence: Synthetic polypeptide
EHDCKVHCVKEWHAGHACAERQKSYTIGRAHCSGQKFDVFKCLDHCAAP

SEQ ID NO: 561 - protein, 51 aa, Artificial Sequence
  Description of Artificial Sequence: Synthetic polypeptide
GSEHDCKVHCVKEWMAGHACAERQKSYTIGRAHCSGQKFDVFKCLDHCAAP

SEQ ID NO: 562 - protein, 51 aa, Artificial Sequence
  Description of Artificial Sequence: Synthetic polypeptide
GSEHDCKVHCVKEWMAGKACAERQKSYTIGRAHCSGQKFDVFKCLDHCAAP

SEQ ID NO: 563 - protein, 51 aa, Artificial Sequence
  Description of Artificial Sequence: Synthetic polypeptide
GSEEDCKVHCVKEWHAGKACAERQKSYTIGRAHCSGQKFDVFKCLDHCAAP

SEQ ID NO: 564 - protein, 51 aa, Artificial Sequence
  Description of Artificial Sequence: Synthetic polypeptide
GSEEDCKVHCVKEWMAGHACAERQKSYTIGRAHCSGQKFDVFKCLDHCAAP

SEQ ID NO: 565 - protein, 51 aa, Artificial Sequence
  Description of Artificial Sequence: Synthetic polypeptide
GSEHDCKVHCVKEWHAGKACAERQKSYTIGRAHCSGQKFDVFKCLDHCAAP

SEQ ID NO: 566 - protein, 51 aa, Artificial Sequence
  Description of Artificial Sequence: Synthetic polypeptide
GSEEDCKVHCVKEWHAGHACAERQKSYTIGRAHCSGQKFDVFKCLDHCAAP

SEQ ID NO: 567 - protein, 51 aa, Artificial Sequence
  Description of Artificial Sequence: Synthetic polypeptide
GSEHDCKVHCVKEWHAGHACAERQKSYTIGRAHCSGQKFDVFKCLDHCAAP
